United States Patent Application Publication US 2010/0064393 A1 - sequence listing, part 5

SEQ ID NO: 9304 - protein, 37 aa, Bacillus licheniformis
VCRTKGGRLKFPVENRNRSLDRSGGVLYHFLTKFLSE

SEQ ID NO: 9305 - protein, 288 aa, Bacillus licheniformis
MKTIFEALRWASSYLTEAGRDRNAAEILLTDQLNIDRSKLLSSFHDVISESDFARFKKSVELHHQGVPVQYITGKESFYGREFSVNENVLIPRPETEEVVEAVLSEAERVFHGIDRLKAVDVGTGSGAIAVTLALESPRFSVTATDISEQALSTARHNADRLGAKVDFLCGDLLEPLIARQKKADVIVSNPPYISEEDMRTLSDVVRLHEPAGALTDGADGLQFYKRFMKEIPSVIADQALVVFEIGWTQGNAVKDMFHRFFPDADVRVKKDLNGKDRIVCAVIEQHS

SEQ ID NO: 9306 - protein, 356 aa, Bacillus licheniformis
VLDRLKSIEDRYEKLNELLSDPEVVNDPKKLREYSKEQSDLQETVEVYRRYRSASEQLSDAKAMLEEKLDSDMREMVKEEISELQEEIESLTDQLKVLLIPKDPNDDKNVIMEIRGAAGGEEAALFAGNLYRMYSRYAELQGWKTEVMEANMTGTGGYKEIIFMINGNGAYSRLKYENGAHRVQRVPETESGGRIHTSTATVACLPEAEEVEVDIHEKDIRVDTFASSGPGGQSVNTTMSAVRLTHLPTGVVVSCQDEKSQIKNKEKAMKVLRARIYDKFQQEAQAEYDQNRKSAVGTGDRSERIRTYNFPQNRVTDHRIGLTIQKLDQILEGKLDEVIDALIVEDQASKLQQAES

SEQ ID NO: 9307 - protein, 127 aa, Bacillus licheniformis
MLESIHHIAIICSDYEASKTFYADKLGLEILSETYRKDRESYKLDLSLNGRYVIELFSFPDPPARLTRPEAAGLRHLAFTVADLDQTVKELKQKGITAEPIRTDPGTGKRYTFFPDPDGLPLELYEA

SEQ ID NO: 9308 - protein, 186 aa, Bacillus licheniformis
MNTADAANELGVSTKTVQRWVKQLQLPASRNELGHYFFTEDDIAILKEVKEQLKNGTPMQDVTVKRPKKTFFIKKNEMIQTKEPAPQLNERLEERLQRFLEHEQLERELLQKKIAELERKLEQKADDVVSYQLLQQRRELEEERQQIKHLEQKISQLESMNRQEKDTAGRREEKKPKSKLKSIFSF

SEQ ID NO: 9309 - protein, 318 aa, Bacillus licheniformis
LDFLNILILLAPIFFVIALGWFAGHFGSYDAKSAKGVSTLVTKYALPAHFVSSILSTPKDKFYSQIPLMISLVVGIVGFYVIILLLLRFLFKYDLTDASMFSLNSAQPTFAFMGIPVLGSLFGMQEVAIPIAITGIVVNAMLDPLAIIVGTVGRSSKKQTETTDSIWKVTGKSILHGLSEPLAFAPLASIILVLFGLQIPELPQKMLDMLGNTTSGIALFAVGVTVGIRKIKFSMPALSIALLKVAAQPALMFVIAMVVGLSSADMTKAVLLVAFPGSAVAAMIATNFESQEAETASAFVISAVLSIISLPILIAITA

SEQ ID NO: 9310 - protein, 38 aa, Bacillus licheniformis
MFCHRAAPIKYEKMGSAAGNRASRVYQPPLICPLKGTT

SEQ ID NO: 9311 - protein, 567 aa, Bacillus licheniformis
VNNMRRTKEGHLETSLRGKDVLSIPTLNKGVAFSLEERKNLGLEGLLPPTVLSLDQQAERAYEQFSRQPDRLRQNVYLNDLQNRNEVLFYKLLQNHLREMLPVVYTPTVGEAIQEYSHEYRRPHGVYLSIDDMDGIETAFKNLQASADDIDLIVATDSESILGIGDWGVGGINIAIGKLAVYTAAAGIDPSRVIPVVLDVGTNNEKLLNDPLYIGNRHPRVEGERYEQFIDAYVETALKLFPNALLHWEDFGNKNARNIMSKYNHKIATFNDDIQGTGAITLAAILAAVKKTGTSLKDHRVVIFGPGSAGIGIADQIRDTMVLEGLSEEEANRAFWTVDYRGLLTTGMDQIMDFQEPYLRDTEEVKDWKRNEKGEISFEEVIRQVKPTILIGTSGVAGAFSEEIIKEMAAHTERPVILPMSNPTHLAEAVPEDLFKWTDGKALVATGSPFEAVEYNGVKHEIGQSNNAFVFPGLGLGTIVAKAKVITNGMFAASANAVANMVDHEKPGAGLLPKIDDLQDVSVQVAIDVVKAAIKDGVAQVQPEDVEKAVREAMWRPEYKTIVAKQD

SEQ ID NO: 9312 - protein, 194 aa, Bacillus licheniformis
MYIMKQSGWLELICGSMFSGKSEELIRRIKRATFAKQEVKVFKPAIDNRYSSESVVSHNGTSIVCHAIASPEEIFQYISKETDVIGVDEVQFFDETIVGTLTSLADQGYRVIAAGLDLDFRGEPFGVVPDLMALAETVTKLQAVCSVCGSPASRTQRLINGKPASYDDPVILVGASEAYEARCRHHHEVPGKPK

SEQ ID NO: 9313 - protein, 66 aa, Bacillus licheniformis
MKAGIHPEFKKATVKCACGNEFETGSVKEEVRVEICSECHPFYTGRQKFASADGRVDRFNKKYGLK

SEQ ID NO: 9314 - protein, 427 aa, Bacillus licheniformis
VKDVSISSLENMKLKELYELARHYKVSYYSKLTKKELIFAILKANAEQEDLLFMEGVLEIIQSEGFGFLRPINYSPSSEDIYISASQIRRFDLRNGDKVSGKVRPPKENERYYGLLHVEAVNGDDPESAKERVHFPALTPLYPDRQMVLETKPNHLSTRIMDMMAPVGFGQRGLIVAPPKAGKTMLLKEIANSITTNHPEAELIVLLIDERPEEVTDIERSVAGDVVSSTFDEVPENHIKVAELVLERAMRLVEHKKDVIILMDSITRLARAYNLVIPPSGRTLSGGIDPGAFHRPKRFFGAARNIEEGGSLTILATALVDTGSRMDDVIYEEFKGTGNMELHLDRSLAERRIFPAIDIRRSGTRKEELLVPKEHLDRLWSIRKTMSDTPDFVEKFMRKMKKTKTNQEFFDILIQEWKQANMSAARR

SEQ ID NO: 9315 - protein, 315 aa, Bacillus licheniformis
MELVRVTEAAALKSARWMGRGKKDEADDAATSAMRDVFDTIPMKGTVVIGEGEMDEAPMLYIGEKLGNGYGPRVDVAVDPLEGTNIVASGGWNALAVIAVADHGNLLNAPDMYMDKIAVGPEAVGCIDIEAPVIDNLKAVAKAKNKDVEDVVATILNRPRHEKIIHELREAGARIKLINDGDVAGAINTAFDHTGVDILFGSGGAPEGVLSAVALKALGGEIHGKLLPQSEEELRRCEKMGLDTGKVLRMEDLVKGDDAIFAATGVTDGELLKGVQFKGSVGTTHSVVMRAKSGTVRFVDGRHSLKKKPNLVIRP

SEQ ID NO: 9316 - protein, 429 aa, Bacillus licheniformis
MEKLNIAGGDPLNGTVHISGAKNSAVALIPATILADSTVTLEGLPHISDILTLRDLLREIGGNVHFEKGEMVVDPAPMISMPLPNGKVKQLRASYYLMGAMLGRFKKAVIGLPGGCHLGPRPIDQHIKGFEALGAEVTNEQGAIYLRAEELKGARIYLDVVSVGATINIMLAAVLAKGRTVIENAAKEPEIIDVATLLTSMGAKIKGAGTDVIRIEGVESLHGCRHSIIPDRIEAGTFMIAAASMGQEVLIDNVIPTHLESLIAKLREMGVRIEESSEQILMVGGQKELKPVDLKTLVYPGFPTDLQQPMTSLLTKANGTSVVTDTIYSARFKHIDELRRMGASMKVEGRSAIITGPAPLQGAKVKASDLRAGACLVVAGLMAEGVTEITGLEHLDRGYSQLEEKLTKLGATVWREKLTDQEIEQLQNS

SEQ ID NO: 9317 - protein, 211 aa, Bacillus licheniformis
MLFFIDTANLDEIKEAHALGVLAGVTTNPSLVAKENISFHDRLREITEVVSGSVSAEVISLKAEEMIEEGKELAKIAPNITVKIPMTPDGLKAVKALTDLGIKTNVTLIFSANQALLAARAGATYVSPFLGRLDDIGHNGLDLISEIKQIFDVHGLDTQIIAASIRHAQHVTEAALRGAHIGTMPLKVIHQLTKHPLTDKGIEQFLADWNK

SEQ ID NO: 9318 - protein, 285 aa, Bacillus licheniformis
MPLVSMTEMLNKAKENGYAVGQFNLNNLEFTQAILQAAEEEKSPVILGVSEGAGRYMGGFKTVVAMVKALMEEYNVTVPVAIHLDHGSSFESCAKAIHAGFTSVMIDASHHPFEENVATTSKVVELAHFHGVSVEAELGTVGGQEDDVIADGVIYADPKECQELVERTGIDCLAPALGSVHGPYKGEPNLGFKEMEEIGNTTGLPLVLHGGTGIPTADIKKAISLGTAKINVNTENQIASAKAVRETLAAKPEEYDPRKYLGPAREAIKETVIGKMREFGSSNKA

SEQ ID NO: 9319 - protein, 124 aa, Bacillus licheniformis
MNEKILIVDDQYGIRVLLNEVFNKEGYKTFQAANGIQALDIVKNQRPDLVLLDMKIPGMDGIEILKRMKIIDEGIRVIIMTACGELDMIQESKELGALTHFAKPFDIDEIRDAVKTYLPIKSNG

SEQ ID NO: 9320 - protein, 176 aa, Bacillus licheniformis
LLKIFTTQLTGIFNRIQEGEAQSIEDGARLLAQAVISDHSVYVYGKNELEGILKEAMYSSEPFPSVKPLQKDEENWPDFEMTDKVLMFCAGSADDEELKMAEKLYEKGIGLVVVSPSGKDGVPIASFADVHIDSKLRMPLLPDEDGTRYGFPSLMVSLYIYHALSFTLKEILQEYQ

SEQ ID NO: 9321 - protein, 45 aa, Bacillus licheniformis
MNIVPVSGRHYHQKEPKKARRRDLPAGFFFFTAFPKSLAKHVRSL

SEQ ID NO: 9322 - protein, 535 aa, Bacillus licheniformis
MTKYIFVTGGVVSSLGKGITASSLGRLLKNRGLNVTIQKFDPYINVDPGTMSPYQHGEVFVTDDGAETDLDLGHYERFIDINLNKYSNVTTGKIYSTVLKKERRGDYLGGTVQVIPHITNEIKDRVFRAGKETHADVVITEIGGTVGDIESLPFLEAIRQIKSDVGRDNVMYIHCTLVPYLKAAGEMKTKPTQHSVKELRSLGIQPNVIVVRTEMPISQDMKDKIALFCDIDPKAVIEAGDADTLYSIPLDLQKQGLDSLVCSHLKLDCREADMEEWKELVKKVKNLSKTVTIALVGKYVELPDAYISVVESLRHAGYAFDADIQVKWINAEEVTEDNVADLVQNADGILVPGGFGDRGVEGKITTVKYAREQKIPFFGICLGMQVASIEYARNVLGLEGAHSAEIDPSTPYPIIDLLPEQKDIEDLGGTLRLGLYPCKLQEGSKAYQAYENEVVYERHRHRYEFNNEFRQQMEEAGFVFSGTSPDGRLVEIIELKDHPWFVASQFHPEFTSRPTRPQALFRDFVHASLKTSEKL

SEQ ID NO: 9323 - protein, 40 aa, Bacillus licheniformis
LGSSKRRDSSDTDYQLPFKKLKGSFLVFPPPNHLNHLEKI

SEQ ID NO: 9324 - protein, 171 aa, Bacillus licheniformis
MSLKQYSEEQLKEMALVEIAYEIFSEHKKPITFQELTDQVASLLGMGKEELEDRIAQFYTDLNIDGRFLALSDQTWGLRSWYPYDQLDEETQPTVKAKKKKAKKAVEEDLDLDEFEEIDEDDILLDDVEEDLDIDADEFDEIDEADDDELDDLEDEILDDDEDFDEEEDEE

SEQ ID NO: 9325 - protein, 52 aa, Bacillus licheniformis
VENRRLARLDLPPADRLPAQFFCFEGAGRSRLFYVSIPLAADFQCNRQKLLN

SEQ ID NO: 9326 - protein, 379 aa, Bacillus licheniformis
MIFKLSEEHQMIQKMVRDFAHHEVEPTAKERDEEERFDMELFAKMAELGLTGIPWPEEYGGIGSDYLAYVIAVEELSKVCASTGVTLSAHTSLAGWPIYAFGTEEQKQEYLKPMARGEKIGAYGLTEPGSGSDAGGMKTTAEKKGDEYILNGTKIFITNGGIADFYIVFANLAPEQKHKGTTAFIVEKDFPGFSVGKKERKLGIRSSPTTEIIFQDCRVPLKNRLGGEGEGFKIAMKTLDGGRNGIAAQAVGIAQGAFEAAKAYAKERKQFGRPIAEQQGIAFKLADMATEIEASRLLTYQAAWLESEGLPYGKASAMSKLYAGDTAMKVTTEAVQIFGGYGYTKDYPVERFMRDAKITQIYEGTQEIQKLVISRMLMK

SEQ ID NO: 9327 - protein, 376 aa, Bacillus licheniformis
LNFQFTEEQTRMQKVVRDFVKQEVAPFVPEMEKGRFPTSLLKKMAERGWMGLPIPAKYNGAGHDFITYMMTIHELSKKSAVLGAVLSVHTSIVTIPILLNGNERQKEHYVKKLAAGQYLGAFCLTEPSAGSDAGSLKTRAEKRGDTYVLNGTKVFITNGGAADIYLVFASTDPEAGTGGISAFIVEKGTPGFFIGKNEEKMGLHGSLTVTLNFDNAVIPARQLLGEEGMGFKMALSNLDTGRIGIAAQALGIAEGALSEAVQFLKKRYPDGELYKNGQALAFKLADMAARTEAARLLVYQAASLKQQGMQTGKAASMAKLFASETAMYVAGEAVQLLGDFGYTKDFSAERYFRDAKVCEIYEGTSEIQRIVIGKHL

SEQ ID NO: 9328 - protein, 287 aa, Bacillus licheniformis
MKKDTIMVIGAGQMGSGIAQVSAQAGYNVYMYDVSPEQIEKGMKRISGQLFRQAEKGKLPHEDVKQIYQRLSPSAALDEAREAFLIIEAAVEQMDVKKDIFTRLDEVTEDSAILASNTSSLSITELAAVTKKPQNVIGMHFMNPVPVMQLVEVIRGLETSGETYETVVAAAERMNKVPIEVRDFPGFISNRILMPMINEAVFALYEGIAEKESIDGIMKLGMNHPMGPLALADLIGLDTCLYIMETLHEGFGDDKYRPCPLLKQYVSAGRLGKKTGRGFYTYEKQPT

SEQ ID NO: 9329 - protein, 392 aa, Bacillus licheniformis
VARSVIAGGARTPFGKLGGALQSKTAAELGGIAVKEALKRSGVNPEDVDEVIMGSVLQGGQGQLPSRQAARFAGLPWDVKTETINKVCASGLRSVTMADQIIRAGDAEVIAAGGMESMSNAPYLLQKARWGLRMGDGAVKDLMIADGLTCSFTGVHMGSYGNAAAKELEIAREEQDRWALRSHMRAVHAADSGALGEEIVPVSIQEKRGGELTVDQDEAPRRDTSMERLSKLAPVFDHNGTITAGNAPGVNDGACSLIVMNEDKAKELNVKAPAVIKAHTSIAVEAKDFPKTPGLVIRELLNKTGAELSDIKLFEINEAFAAVALASGKIAGLDMEKVNVNGGAIAIGHPIGASGARIILTLMYELKRRGGGIGIAAICSGGGQGDAVMIEV

SEQ ID NO: 9330 - protein, 704 aa, Bacillus licheniformis
MNVLLSLNFIAFLGITAYAVYLFVYLIRTRISYIRLGQKEDFDKRTKERLQKIWENVFGQKKLLKDKKSGIIHVMFFYGFILVQFGAIDFILKGLVPDQGLPLGGVYPAFTFFQEIVTLMILIAVVWAFHRRYIEKLVRLKRNFKSGIVLMLIGGLMFTVLLGNGMNMIWHEHSLSWHEPMASGIAFAFGFMGETASAAVFYAAWWAHLLILLTFLVYVPQSKHAHLIAGPANVFFSRLTNPGKLQKIDFEDETKETFGVGRIEEFRQSQLIDLYACVECGRCTNMCPATGTGKMLSPMDLILRLRDHLTEKGAAVTSRTPWVPAPLFQHTKGNQLAMAAGGEGSREAAASELYNPSLIGDIITEEEIWACTTCRNCEDQCPVMNEHVDKIIDLRRYLVLTEGKMDADAQRAMTSIERQGNPWGLNRKERENWRDIRDDVEVPTVKEMKKKGESFEYLFWVGSMGSYDRRSQKIAMAFARLLNQAGVTFAILGNKEKNSGDTPRRLGNEFLFQELAAKNIEEFEKNDVQKIVTIDPHAYNIFKNEYPDFGLKAEVYHHTEILAALIEEGKLKPEFPVHETVTFHDSCYLGRYNEVYDPPRAILRSIPGMRLAEMERSRENGMCCGAGGGLMWMEEEAGARINVARTEQALSTSPSVISSGCPYCLTMLGDGTKAKELEDQVGTYDVAELLERAVFGSEQKEHAS

SEQ ID NO: 9331 - protein, 396 aa, Bacillus licheniformis
LVPLMIMVCFLILLLALDFHFGRKAFEKKAYEPVFSEKKSDIELIHNGEDLCERLLDDIRQAESSVHVMFYIVKNDDISLEFLKVLKDKAKSGVCVRLLIDRIGAMKVKKKTLSGLKQSGVHVFFANKPGFPYFFYRLNARNHRKIAVIDGKIGYVGGFNIAKEYLGKKAEFGPWKDYHLRMTGEGVADLQHIFISDFKREAPQAKPANSVFPPLQQGAVTHTTHATKGFSLEEKYISFIEQAKERIMICTPYYIPSPALQQAVLSARERGVIVSVLVPMKPDHPLVKEAAYTHFPALLKAGCYIYRYYRGFYHAKALIVDDRHVMIGTSNFDNRSLFLNDEVNVVIHDKDWTKQFFDVVKESIEHAELLTKERYAKRPVMQRPVEWLAKSISFFL

SEQ ID NO: 9332 - protein, 88 aa, Bacillus licheniformis
MNQAESIKLRAQSMTLKNLIELYKLCRSARHQLYICSRKTMCKIKDLIELEMFRMANRENECLIVIEGKMAQELVKKAQSILSDAQVQ

SEQ ID NO: 9333 - protein, 556 aa, Bacillus licheniformis
MNIVEQMKDVLKQEIKEAVMKAGLAEESEIPEVVLEVPKDKSHGDYSTNMAMQLARIAKKAPRNIAEEIVASFDKGKASIDKLDIAGPGFINFYMNNQYLTKLIPAVLEAGEAYGETNIGGGERVQVEFVSANPTGNLHLGHARGAAVGDSLCNVLEKAGYEVSREYYINDAGNQINNLALSVEARYFQALGKDKPMPEDGYHGEDIKEIGQKLADEFGDRFVHEEESERLAFFREYGLKYELGKLREDLENFRVPFDVWYSETSLYQNGKIDQALEALREKGHIYEEDGATWFRSTAFGDDKDRVLIKKDGSYTYLLPDIAYHKDKLDRGFQKLINVWGADHHGYIPRMKAAIEALGYDKETLEVEIIQLVHLYKNGEKMKMSKRTGKAVTMRDLIDEVGLDAVRYFFAMRSADTHMDFDLDLAVSTSNENPVYYAQYAHARICSMLRQGEEKGISFEGNLDLTKIGSEKEYDLLKVIGSFPEAVADAAEKRIPHRITNYIFELASVLHSFYNAEKVLDPADEEKSRARLSLMKATQITLNNALKLIGVSAPEKM

SEQ ID NO: 9334 - protein, 142 aa, Bacillus licheniformis
MDQETPVHIYVKSVIREGSDTETIEFRTTGFYYMKKDKIYLSYHEEHDAGKVKTIVKASENEVLVMRSGAIEMKQRFRPGSRTVTHYKMPFGRLELGVDTKAVSVTHQPPDGKISIEYDMIVSDEQKHLHKMSISYRGGHES

SEQ ID NO: 9335 - protein, 290 aa, Bacillus licheniformis
MRFDEAYSGKVFIASRPDWEEADAILYGMPMDWTVSYRPGSRFGPARIREVSIGLEEYSPYLDRELEEVHFFDAGDIPLPFGNPQKSLDMIEEYVDSILDKGKFPLGMGGEHLVSWPVIKAMYKKYPDLAIIHMDAHTDLRVDYEGEPLSHSTPIRKAAELIGPGNVYSFGIRSGMKEEFEWAKENGMHISKFEVLEPLKAVLPKLAGRPVYVTIDIDVLDPAHAPGTGTVDAGGITSKELLASIHEIARSDVNVVGGDLVEVAPVYDHSEQTANTASKLIREMLLGWVK

SEQ ID NO: 9336 - protein, 276 aa, Bacillus licheniformis
LSGLWYTEKQTKNFGITMKINRTLHTEQTDFQKLEMAETEEFGNMLFLDGMVMTSEKDEFVYHEMVAHVPLFTHPNPEHVLVVGGGDGGVIREILKHPSVKKATLVDIDGKVIEYSKKFLPSIAGKLDDPRVEVKVDDGFMHIAQSENEYDVIMVDSTEPVGPAVNLFTKGFYAGIAKALKEDGIFVAQTDNPWFTPELITNVQRDVKEIFPITKLYLANIPTYPSGLWTFTIGSKKYDPLEVEDSRFFDIETKYYTKEIHKAAFVLPKFVSDLIK

SEQ ID NO: 9337 - protein, 138 aa, Bacillus licheniformis
VIVKTDRFIFRSHSKSIIFPIADFSFIMAKLSTDVHTVRFWRCSHLQSKQLLKLYITSRRKRFLLIFFLIGAAVLFFSPVYIREAAVPSLPDWLLEVSGSVYLMHMVAVLSAACLFYGTANGCGVQQVQLQQTERCCR

SEQ ID NO: 9338 - protein, 163 aa, Bacillus licheniformis
MRRSAGAIATNRTVLPLILLGCTVSAFVMICLLFWSAAIGWFTFGGYGAENVHPFFELSGSPLWFVVSRLFIDWWSLCFLIFLGLAGVLIAKKEQLALWLPLAWSSGLMLLFKFNISFKGLLPGEGMLLSIHAAGASPILAASVNEGAVFVLWLISYVATAKK

SEQ ID NO: 9339 - protein, 691 aa, Bacillus licheniformis
MDMMTDKRVRLTIKTIRAFLFMGALMLIFLSIVVMTVVLAAKWQGAPSIQVPRSTVLYDGSGKQMGETHYGQKRYWVSLKNINPAVIDATLAVEDRNFFRHHGFDYMRMGGALIADLKAMSKVQGASTITQQYARNLYLGHDKTWKRKWNEAFYTIRLEQNYTKKDILEGYLNTIYYGHGAYGIEAASRLYFGKRAKDINTAEAAMLAGIPKGPSVYSPFVNEKKAKERQEMILTMMEKQNKLTEMQAAALKKMPLRFEKQDKQTTEKTAPYFYDEAVKEISRLLRLTPEQAETGGYNVFTTLNPRLQKIAEDTIEHTIDSSSDIQAGFAAINPSDGSVLALVGGRDYEKSPFNRVTQAMRQPGSTMKPFLYYSAVQNGFTPATRMRSAETTFELGQGSAYSPSNYHGYYADGPITLLQALALSDNIYAVKTHLFLGMDKLIDAAKQFGINSPLQKVPSLALGTSPVKPIEMVNGYAMFANGGKKIEPSFITKITDPNGKVLYEKPKRSKQILDPKAAFITANMMSGMFDKSLNGYTSVTGRTIADQLTRRYAGKSGTTSTDSWMIGFYPGLASGVWTGYDKERTIDAVAEKNYAKQIWAEFMEKALEDAPAAALMPPEGVKGMYIDPATGYAAAPSCPSKYFAYFIKGTEPEQVCYGKEIYKEQNAGHEKPAAPPHKRQKWWEKWFKKGE

SEQ ID NO: 9340 - protein, 171 aa, Bacillus licheniformis
MEQGKKKKTIGFNIIKSDPTDGHGGFGAGALSLDNISPVIVDVEEKEAFVDIGAMHARSTVEKGIKFLPNKEEVPNGKPYWLVWVTIDRREEGPYYAGVTACEMTVDRSIRRGYKSLPEHVNLMDKSMKRKIIVEHMDEGSKRVLADFLKNHDQGLWDRSSDELKKGLLQQ

SEQ ID NO: 9341 - protein, 229 aa, Bacillus licheniformis
LYMRKRESHILDRFLIYPLEMIPYVVLTLAAAFTVHEVAHAYVAYKFGDETAKRQGRLTLNPLKHLDPFGTILIFILGFGWAKPVPVNRFYFKNPRLAGFLVSIAGPISNLILAFIGFILLLLSVKLSGTLPAGFYSGLLQFFTIWVNLNLLLFLFNLMPFPPLDGFRVIQDVVAPEVRAKLSKYEAYGSIVFLIIVITPLGQYVFWPFLNDGRELIISIFNSVFRPLM

SEQ ID NO: 9342 - protein, 61 aa, Bacillus licheniformis
MPYVTVQMLEGRTDEQKRNLVKKVTEAVSETTGAPAEKIAVIIEEMKKENYGVAGKRMSDM

SEQ ID NO: 9343 - protein, 268 aa, Bacillus licheniformis
VKKRSLFLSLLLSVSLIPGVTAGAAKTGGHEHEHDHEARGTYIDSLPKAKDFKDLKGKVQIERTVNTKILDEKGNVTGTKTFKKNTGKGSFSTQAGTGSQKVSVLAVADAQYRAKYSDWQTRIVQIIEQADVMFNRDHDVDFVVEAVAPWTSSGSNSSQILSNLQSNFSGRSYKFVVGFTANSNFDAGGIAYVYNSKPNGSAFSVNLDQGTANTAKAATHEFSHNFGLNHDVQGSGIRCIMNYDYAYTVDVWDSAHNSQITKNKAWYK

SEQ ID NO: 9344 - protein, 58 aa, Bacillus licheniformis
MKNSASYQKIPSIHPKRGNITYVLFTASFNFPTKIPKRRQKNKPKNLPFFGRLMNKDF

SEQ ID NO: 9345 - protein, 167 aa, Bacillus licheniformis
LLKEHAKLMKVFSDSGEIVGRKKLQKIIYIAKKLELPFYEKYDFHFYGPYSEELTLQVEELCNLGFLHEVKEKKGGYYQYRYSPTEAGKQFLSQCELDMRDIKAYLDDVNGQSSRFLELVSTILYFEGLEQEEIREKVFTVKSKQRYTDEEFDEAVAYIKKLRNLCS

SEQ ID NO: 9346 - protein, 432 aa, Bacillus licheniformis
MAYPNGKLSEEKVFKDPVHRYVHVRDKLIWDLIGTREFQRLRRIKQLGTTYLTFHGAEHSRFNHSLGVYEIVRRMVDDVFKGGEEWDDSERDLCLCAALLHDLGHGPFSHSFEKVFRLDHEDFTRAIILGDTEVNRVLNKVSPTFAKDVAEVIAKTYQNKQVVSLISSQIDADRMDYLQRDAYYTGVSYGHFDMERILRVMRPREDQIVIKQSGMHAVEDYIMSRYQMYWQVYFHPVTRSAEVILTKILHRAKQLHEEGYVFTHAPVHFYSIFEGNVTLEDYLSLDESIILYYFQAWEKEEDEILSDLCRRFINRRLFQYAEFNPNEEMATYFELTNLFKESGIDPEYYLVVDSSSDLPYDFYRPGEEEERLPIQLLTHNGQIKELSRQSDIVDAISGKRRTDHKLYFPLDLIEGLPDGRHAKRMKELLGLK

SEQ ID NO: 9347 - protein, 46 aa, Bacillus licheniformis
LPDLLVFFKVCFYYIESVFLKTSLNLPGHLFQPAKKPLNKQKRLTR

SEQ ID NO: 9348 - protein, 74 aa, Bacillus licheniformis
MANEFRVCDDCQATNLKTLLPRLKEIDPDAKVEIGCQSYCGPGRKKSFAFVNNRPLSAPDEDELIEKVKKKLKK

SEQ ID NO: 9349 - protein, 54 aa, Bacillus licheniformis
LAIVAYSKFISHFIRFLSFCSSVFMKGIQLCRTFIKNDTILHFTRILSFLQGSR

SEQ ID NO: 9350 - protein, 261 aa, Bacillus licheniformis
MKQRQDAWSEENDLLLAETVLRHVREGSTQLNAFEEVGDRLNRTSAACGFRWNAVVRHQYEKALQLAKKQRKQRMRALGNGQPAKKRLLYKPPVETNAEPPAESVVEQKKATADSSEQQPIASEHLPYVDESFKEELASLSHLLSPNQPQAGHTADTSKDMTIDDVIRFLQNYTGNEEQTAALKMENERLKQENEELTKKVEKLEAEVKKLEKDQTTIQEDYETLVKIMNRARKLVLFEEDEHAAPAFKMDRNGNLEKMAE

SEQ ID NO: 9351 - protein, 28 aa, Bacillus licheniformis
MHTNIFRYEDTPFFKKGGIFTFLRLAFI

SEQ ID NO: 9352 - protein, 109 aa, Bacillus licheniformis
MKFVLYAVQFGTAALLFLFSALASWYQGSELLKVPWEWKYTAKFTSWLYGEDSIKNAHNISQLDFFVYAAKHTPATVILMAVSLAYIIALAAYLLIKTYVKRKSASSAA

SEQ ID NO: 9353 - protein, 281 aa, Bacillus licheniformis
MAKQPIDLLIQPKWRIIDQSSLGPYFDAKQSFAIDDTLCASVGKGLSPATARSWVHHDTIVLGIQDTRLPYLQEGISLLEEAGYQAIVRNSGGLAVVLDSGVLNVSLIFQDKKNGIDIDRGYEAMFELVKRMLSSYDAAIEAYEIKGSYCPGSFDLSIGGRKFAGISQRRLRGGVAVQIYLCADQSGSGRAELIKRFYDTALKDMRGKTKAVYPDIRPETMASLSELLNEDISVQDLMLLLLTQLKELGGEIYQGPLTPAEEEVYEKNLVRMIERNEKVFG

SEQ ID NO: 9354 - protein, 401 aa, Bacillus licheniformis
LRTQVGIIGAGPAGLMLANLLHRRGIEAVVIESRSRKEIEETVRAGVLEQMTVDLLNETGAGERMMKTAMFHQGIEIRFGGKRHRIDMHKLTGGKYIAIYPQHEVIKDLTAARLQSEGRIVFNVSDVRLSNIDTEAPVITYQNENGDTEELNCDFIAGCDGFHGPSRQSIPKEIRKEYEKVYPYGWLGILAEAPPSSPELVYAHHEDGFALVSTRTPEIQRLYLQVSPADSVGNWPDERIWEKLHLRLSADDGWKLTEGPIIQKNIVSMRSFICDPMQYGRLYLAGDAAHIVPPTGAKGLNLAMADVQRLAWALEDYYETGRIERLAGYSESCLRRVWKAERFSWYMTSLLHRHHGYTPFDYQIQLAELDHVTTSTAAAQSLAENYVGLPLEFGEPSLSVT

SEQ ID NO: 9355 - protein, 322 aa, Bacillus licheniformis
MNTAALADDRVFAEKNRAVIVAAMYCGYSAGGVLASLVGMFAVPVTSWRVLYLIGAVPLFVLPFFFSRFPESLSFYVLKKKTKALAEIFNQVHPAGRYREDDNYQISVIAKEKKGFPVKKLFGQKRAASTFAFWLSVFSCLLMVYGLNTWLPKMMQASGYGLSSSLSFNLALCCGQAAGAVFGGYLADKAGHKKVLAAMYVIGAFCFAAFGMTMNPVLLYLLIALGGACTVGAQNIANPYISEYYPKEIRATGIGWALGVGRLGAIIAPSLFALILASGMEPKQAFMVFAIPSVFAALGIMLVQEKHASFDFVSKSESAGIH

SEQ ID NO: 9356 - protein, 491 aa, Bacillus licheniformis
MNVQTPSEKLVKPFDCQHYINGRYFPSEKGSTFDNINPATQEIIGSVAEGGKKEVDLAVAAARRALNGRWKNMTADERIRIIRKVGDIILERKDELARLETLDTGKPLSLSSTLDIPRAAFNFHFFADFMRGAGTEAYQTDDLAINYAIRRPVGVVGLINPWNLPLLLLTWKLAPCLAAGNTAVIKPAELTPMTATLLGEICHDAGMPDGVVNIVHGFGPDSAGAALSEHPDVDAISFTGETTTGKVIMEAASKTLKKLSFELGGKNPNIIFADADMDEAVSTSLKSSFVNQGEVCMSGSRIYVEREAYDEFLNKFVEKTKKLKVGDPFDPDTNIGALISSEHTERVMNYIELAKREGGNILTGGKRPEGQESGCFLEPTIITGLSRNSRLIKEEIFGPVVTVIPFDDEEEVIAQANDTHYGLSATLWTNDLRRAHRVAGQIESGMVWVNSWFLRDLRTPFGGMKQSGLGREGGIHSLEFFSELTNICIKL

SEQ ID NO: 9357 - protein, 40 aa, Bacillus licheniformis
MFLYAEQIRHFFRKFDIFRFFIFYIVLYYGIKGNKNKGES

SEQ ID NO: 9358 - protein, 259 aa, Bacillus licheniformis
MTVETKDHQLLGSVKNALRLLQSFTLDTPEKKLTELASSLGLGKSTVSRLLSTLESEGFVMKDPESRRYKLGLSVLQLNTIVNSTLEINRESLPVLKRLTDETGETSHIAMRRGLSVVYLNRTECPRPVELLSYIGRQNPMHCTSSGKVLLAFDEEGILDEYVKEGLKSCTKETITDGDKLREVLKTVKENGFDVSCGEFIDGVTSISAPVRNHAGRVLYAVSVEGPAKRIKARQAKIIYQVKQAARDISERIGYWKRI

SEQ ID NO: 9359 - protein, 316 aa, Bacillus licheniformis
LYDLHTHFIPRDVLLWLEDNEKRVHAVREKKAGCQADFLTVNHKWGFELKELFYQEALYLEAQQEAGVTHSLVSPVPQLFLYDLAEEITDELSFVYNKALAEWVKKYDGRLSGLGTVPLNSPSKASERLNEAMNNGLKGAIIGPGASQLLLSDEAFTPFWETADRRKAIIFIHPLLSEDPRLRRRMLPNLIGVPWETTICAADLLLSGFTDRFRNVKILLAHGGGFLPYQIGRLNKGYDKWAGVSSSLSAPPREYLRKFWFDGVLWEQESAAYLKKLVGEDRLVPGSDFPFDLCQWPPLDPGRKGAESLLNVAIEA

SEQ ID NO: 9360 - protein, 323 aa, Bacillus licheniformis
VADLFTTVQGKVAGKGVKIVFPEGLDERILTAVNKLAGNNVLKPILVGNEQEIKDKANGLNLTLDGVDIYDPHTYEGMEDLVQAFVERRKGKATEEQARQILLDENYFGTMLVYKGLADGLVSGAAHSTADTVRPALQIIKTKEGVKKTSGVFIMARGDEQYVFADCAINIAPDSQDLAEIAIESANTAKMFDIEPRVAMLSFSTKGSAKSDETEKVANAVAIAKEKAPELTLDGEFQFDAAFVPSVAEKKAPDSVIKGDANVFVFPSLEAGNIGYKIAQRLGNFEAVGPILQGLNMPVNDLSRGCNAEDVYNLALITAAQAL

SEQ ID NO: 9361 - protein, 254 aa, Bacillus licheniformis
MSEQQKTNEAAQTLDGWYALHDFRTMDWSAWKMLSSDERQIIISEFTGLLEKWGAAQKEGNGSHTLYSIVGQKADFMLMILRPTMEELNQIELEFNKSKLAEYTIPAYSYVSVVELSNYMGSGDGDPYENPQVRARLYPELPDAKYVCFYPMDKRRSGDDNWYMLSMEERRNLMRSHGMIGRGYAGKVKQIITGSIGFDDYEWGVTLFSDDVLQFKKLVYEMRFDEVSARYGEFGSFFVGNRLAKEQLPAFLHV

SEQ ID NO: 9362 - protein, 93 aa, Bacillus licheniformis
LASTILNSAMPSRSIVSGSLTVFPLFKICPVVSALPFTVSFVVAENPDGKVNSTVPSAKIELGRYVNSISENDHSCLLAPVITEYKEALAAGR

SEQ ID NO: 9363 - protein, 67 aa, Bacillus licheniformis
MSIINSVRDASIMSIMYSQIHRLSTKNQENEEKGSGQAFCPLLKHSGENQEEQRLVKFYYFAFILKI

SEQ ID NO: 9364 - protein, 448 aa, Bacillus licheniformis
MPKLVSSNLVKGKIINISPPQTLALSFLIIIAIGACLLKLPGASTTYISWVDALFTATSATTVTGLVVVDTGADFTVFGQTVIMCLIQIGGLGLMTFAVLVVMMIGKKIGLQQRILVQEAFNQTSLGGLVRLVKHLFIFTIVIEFVAFLILSIRWVPEYGLQKGLFHSLFNTISAFNNAGFSLWPDNLSQYVGDPIVNLVITGLFITGGIGFTVLLDLWTKRNFRKLSLHSKLMIVGTLIINTTAALLIFILEYSNPGTLGGLPLADKMWGAYFQGVTPRTAGFNTLDIAQMTTPSLLLIIVLMFIGAGSASTGSGIKLTTFIVMILATITFLRGKSETVVFKRAIKMKTILRALAIIVISFLFVLFALFILTITENAPFLKIVFEVFSAFGTVGLSMGLTPDLTAAGKAVIMMMMFIGRVGPLTMAFTLAKPKKAPIRHPEDEVITG

SEQ ID NO: 9365 - protein, 178 aa, Bacillus licheniformis
MKFKKNQFQPLQELEMPDFRQQMGPNPYPQMGQMGQMYQQQGQQPFTQMGGQQSYQQPGPQLTQPQPAGVQVPPMPSGQQPSPSIPGMLPLEQSYIENILRLNRGKVATVYMTFENNPEWNAKVFRGEIEAAGRDHIILSDRKTGTRYLLLMVYLDYITFDEPITYDYPYSMASYTPR

SEQ ID NO: 9366 - protein, 381 aa, Bacillus licheniformis
MKEMLWLVKNTLNVTFKKKINIFLFVCLPLLGIFVSLLTEGSMEKTDLRVGIINHDGGRIAEDTKDFLKGIENVNISAVSEAEGKSQVAAGEIDCVITFEQGFSQSVQSGEPAHIAIASVKGAEITGFVKSYVYHYIDNIAAIGKSAQGNEKRFEEMYKNYRNSETSVKTSTIEDTAKNRNMTERTVGFLLMAMLFSAGSLTELLVKEKENRTYFRLLTTPITARQYVMSNVAVSMSVITCQTFLTLIMVKYVFRMETGISFWEMAAVLLIFALSAVGLALITVVFANSSRSSGVLRNLIFMPTIMLSGCFWPVEIMPSFAQRIADFLPQRWVLDTLAKLQEGQQLQGLYLNIMILFAFAAVFFLIVIYKFKRNNDVRNFA

SEQ ID NO: 9367 - protein, 373 aa, Bacillus licheniformis
LNTLIIAKKEIVSAFRDKRTFLFMLAFPIVLIMILGTALTNAFDQQAAVGEVRVLYKDNSDGAFSQGFKTFVKEAKTSGVHFKKVLSDMDEKQEIKQGNYDAYLEIENSGIKLYQMDKNSMKNSIIQGMLTAFANRYNAAAEIIKAAPEQAGAVLGDAPGDNYIKETSLSSDRKPSSMDYYAVAMTTLIALYSALSASYLIRGERLRKTADRLIAAPVHKGEIFAGKLIGNLVTNGLCIFAVVAVSKYVFKAYWGEHLGLVAAVLFSIVLFAVCLGLGVSYLTRTGEAAVAIINVLIPLVAFFGGAYFPVDDAEGVLALITDLSPLAWTNEAIMNIIFADDLAAGLPAILLNIGLSLLFLLIAVVSLQRREGL

SEQ ID NO: 9368 - protein, 311 aa, Bacillus licheniformis
MNVLEINHLTKKFGDFVAVDNISLSIEEGEIFGLLGANGAGKSTTIHMISSLLRSNEGEITILGKNIAKHRKFAKMNIGIVPQDLAIYEDLTAYANVKFFAGLYGLRGAHLHNRVEEALQFVGLSDKHKSFPKNFSGGMKRRLNIACAIAHRPKLIIMDEPTVGIDPHSRNYILESVKKLNAMGCTIIYTSHYMEEVEEICTRIAIVDHGKIIAEGTKEQLKSIITNTKDIQVVLKSAENIDIGELKTISGVEAAVLEDNTIKINSDAGVNNLNQIIEKLMKNGAEIRSLEEKAPNLETVFLTLTGRQLRD

SEQ ID NO: 9369 - protein, 368 aa, Bacillus licheniformis
MELRIMTGKLILLGFIIYQCVFSESDNLPWLVFSLLVYVCINLGIAILPKGKTKKLFIIISVIISIVSYAEVHPLFILFLPFTLCEGAADFGLPKWAVLAASIVPVLFINESISAVYALTAAFQFLLYWAASHDAARIEKLEHHIDQTRRDLQKLTNMLRENKEFIRQSEYTYKLEERNRLSQEIHDKIGHSMTGALIQLEAAKRVLDIDKEKASELLQNAINISKDGIENIRLTLKSVKPPSEQMGIHRLRLFIDECSAQYHMNISFLHKGDLDVISQIQWKIIFENITEALTNSVKYAEATHVSICIHVLNTLIKAEVKDNGKGRQKIKKGMGIIGMEERAASVNGKVIVDGSNGFSVTTLLPKHE

SEQ ID NO: 9370 - protein, 230 aa, Bacillus licheniformis
LHFDRRDVHGGGPVSVQTMKIKVIIADDNSFIREGMKIILSTYDEFEVLATVEDGLQAVEFCRAQAVDIALLDVRMPNMDGVEAARLISETGAKPFILTTFDDDEYIVAAIRNGAKGYLLKNAEPERIRDAIKSVFNGHIVMQDIILDKIKSNLAEHKEAEPKIDESLFTERELGIMALIARGLSNKEISKELFISEGTIANYISSILGKTGLEHRTQIAIYYLTGKVNF

SEQ ID NO: 9371 - protein, 125 aa, Bacillus licheniformis
LIVKLFLILGAVNAMLAVALGAFGAHGLEGKIPEKYLQIWQTGVQYHMYHALGLITVALIASKLAGAVSVSAAGWLMFAGIVLFSGSLYVLSLTQISVLGAITPLGGVTFIAAWIMVVVSVVKYL

SEQ ID NO: 9372 - protein, 433 aa, Bacillus licheniformis
LKLLFGALQWTAFIIASAIVVPIAIGQSFGLNQGETAGVVQSTFFVLGTTAFIQCLLGHRLPINESPAGLWWGVYTIYAGLTGTVFATHIETLQGLQGAMLLSAVFFFIFSLFKVIDKLAVMFTPVVTGIYLLLLVIQLSDPIVKGVMGIGYRKNEVDIPVFFLAVVIMLATFLMSRSNVPILKQYSILIALFGGWILFAVFGVAKAPERANQLFHLPDIFPFGMPMFDSGLVVTSLFITVLLIVNMLASIRVVEGAVKQFEKLEERKRARPAGFIASVSHLLSGLLGAVGTVPISGAAGFIQTTRMSSKKPFLLGSLIVIVISFFPLVMNTFASLPSPVGFAVNFVVFSTMVGLAFAEFDSYEKDEAGNIRFVTGIALLAGVGVMFVPESALEGMHPVFVSILSNGLVLGTIVAIAAEQIQLRKKKYDNIVS

SEQ ID NO: 9373 - protein, 102 aa, Bacillus licheniformis
MNIHISSLLQKMEDELKKAKECHQENELKMHIAVIRSLCDVIVEPQQGPSVQSSPYVQTANKPSSDQLMLEKMMGSAGAEQYKKQEKQKHEDDGNGDSIFDF

SEQ ID NO: 9374 - protein, 59 aa, Bacillus licheniformis
MYVHQIDPPNRFQFPFHFTKLTSLMPNALFKYSLRKIASAAMKHCLLHFKKEYSPAKRG

SEQ ID NO: 9375 - protein, 460 aa, Bacillus licheniformis
MAERTTSIETTVTEQKQYFLSGATLAVENRLEQLNILKDAVKKNERNILEALQKDLNKSEHEAYMTEIGIVLEEIRFISRRLKKWAKPKKAKTAVSHIGSKSIVIPEPYGTVLIIAPWNYPFQLAVSPLIGALAAGNTAVIKPSELAPAVSTVISEMIKDIFPPEYVSVIEGGVKTNQELLRQKFDYIFFTGSVPVGKVVMEAAAKQLIPVTLELGGKSPCIVHKDADLKLAAQRIVFGKLTNAGQTCIAPDYLLVHKDVKNELMRALKQSIQTFYGEKPESHPAYGKIISKRHFERLIRFLQNENIVTGGTYQKDALKIAPSIIDEPDWESPVMQEEIFGPILPVIGYETIEDVIQMVQSRPKPLALYLFTNEKTVQRHILSRISFGGGCINDTLMHTATPYLPFGGVGESGIGSYHGYHSFKTFSHEKSVLKQTNLFDISFRYPSSKNGLRIIKKLLR

SEQ ID NO: 9376 - protein, 225 aa, Bacillus licheniformis
LKQILNDSWWQQLKDEFDKPYYQELREMLKREYAEHTVYPEPNDIYNALHYTSYENVKVVILGQDPYHGPGQAHGLSFSVQPGVNPPPSLKNIFIELQNDIGADIPNHGSLVSWAKQGVLLLNTVLTVRRGQANSHKGKGWEQLTDSIIDVLNKRDKPVVFILWGRHAQMKKERIDTSKHFIIQSPHPSPFSARNGFFGSRPFSRANQYLEQIGDEPIDWSLPNL

SEQ ID NO: 9377 - protein, 272 aa, Bacillus licheniformis
MNISIVVVTHNRVTALCELLESIAKQSVEPFEVIIVNDAGESVDFVERLYSELPIRVIHLKENVKHVKARNIGVKEASGDVIMLCDDDDFFTPCHMERMLNALETADFVYSDAEIVSFEEKEDMRIPTSRYLFAYSFNLDEMRKFSTYVPSGSMYKRSLHDEIGYFDPAVHNYWDWDFFLRAAERFRVKRVPFASVIYAFSDQGDNQSGDLGGMRQYYLDVLSEKHQLGKLPTKNFFVLLEEPAMKKREAESEIVWDGKPVASRLTAARQLN

SEQ ID NO: 9378 - protein, 270 aa, Bacillus licheniformis
MTMHKALTIAGSDSSGGAGIQADLKTFQEKNVYGMTALTVVVAMDPENNWNHQVFPVDTEVIRAQLSTIVDGIGVDAMKTGMLPTVDIIELAADTIKKHSMKNVVIDPVMVCKGANEVLYPEHAKALRELLAPLATVITPNLFEAGQLSGLGEIKTVEQMKEAAKAIHGLGAQHVLITGGGKLNHEKAVDVLFDGRDAEVIEGERIDTPYTHGAGCTYSAAITAELAKGSNVKEAIYSAKAFITEAIRESFRLNQYVGPTKHSALRLSGK

SEQ ID NO: 9379 - protein, 88 aa, Bacillus licheniformis
VDQNQQKLTAMRLKKIADHIEDTREEYNGLLLQMKKLIGGIEDKTIPNDEEVQKKLQDTYEQMKEYALFVESIESFLRSSARTIKRES

SEQ ID NO: 9380 - protein, 478 aa, Bacillus licheniformis
MNQDQELRQKAMNRVEEYRDIVNLDPYRLHYHIMPPVGLLNDPNGFIQWKGVYHLFYQWMPFKTGHGAKLWGHYSSADLVNWRHEEIALTPSDWFDKNGCYSGSAIAENDVLHLFYTGNVRDGEGNRETYQCLAVSKDGISFEKQGVVARLPKGYTAHFRDPKVWKNNGSWYMVLGAQTENLEGRAVLFQSDNLKDWQFLGDITGSNTDQLGEFGYMWECPDMFELDGKDVLIVCPQGLEAEEMLYQNVYQSGYFVGELNELKPWFTHGDFEELDRGFDFYAPQTTKDESGRRILVAWMGVPDQDEQSQPTIPHQWVHCMTLPRELHLQNDKIVQKPVEELRTLRQNEKNAAISLNQGTEKLDIVQPDKAELFISPKVIEEGFEISFRGAARLIYNKAEGIITLERNSYVDEKTEARQCRLQELRNLNIFLDASSIEIFVNEGEEVFTARYFPYPGNNDVWISARKEIIMNVTSWTMA

SEQ ID NO: 9381 - protein, 459 aa, Bacillus licheniformis
MIHKEIAVRLIQLLGGEDNVISAAHCATRLRLVIKDEAKIDQEKVEELEGVKGAFSSSGQYQIIFGTGLVNKVYEQFAKELNLDQKETVQHSDAAKGKMNPLARFAKTLSNIFVPIIPAIVASGLLMGLLGMMKAFQWVDPDAALYKMLDMFSSAAFIILPILIGVSAAKEFGSNPYLGAVLGGILIHPSLFNPWGLATASPDVMDFYGLKIEMLGYQGTVVPILLAVYVMSKIEKGVRRIVPNAIDLLVTPFVTIISTGFIAFIAIGPLGRMLGTGITNILTYVYDVAGPVAGLIFGGTYSLIVLTGVHHSFHAIEAGLIADIGRNYLLPIWSMSNVAQGGAGLAVFFLAKRAKTKEIALPAAFSSFLGITEPVIFGVNLRYRRPFIAAMAGGALGAAYVVFMNVAANAYGLTGIPMIAIVAPLGMGNLIHYLIGMAISVTVAFITAFILGINEDEKK

SEQ ID NO: 9382 - protein, 276 aa, Bacillus licheniformis
LKIYKVLNNNAAIIKEDGQEKIVMGPGIAFQKGKNDTIPRNKVEKIFTIHEENEKFKQILETLPEEHIEAAEEIISYAEGQLSAPLSDHIHIALVDHLSFAIERVRKGFVIQNKLLNEIKALYKKEYEIGLWAIDLVKEKLKVELPDDEAGYIALHIHTAKMDAENMQKTLKYTNIIKELIEKIECCFNQKIDENSISYQRLVTHLRYAINRLESNEAFHVMDDDMLYFIRQKYPESYRCAAGLADYVKTEYDLHLPESEVGYITLHVQRLNDSYR

SEQ ID NO: 9383 - protein, 96 aa, Bacillus licheniformis
MKGLISFLKLWTAVLLNAVMPVRENQMKVTAFAGGTYQAADAYQAGGFSEKREEKTERMSGCKRMKPGSYTTEPSRAVCKKAVKRVRAGPTLYTGT

SEQ ID NO: 9384 - protein, 25 aa, Bacillus licheniformis
EKVSCAILLWLLFYYLRYPHSSPEC

SEQ ID NO: 9385 - protein, 40 aa, Bacillus licheniformis
MKDKPNNTIKESIYTMSSDCFFHVLKRRGASPERIIRILT

SEQ ID NO: 9386 - protein, 84 aa, Bacillus licheniformis
VYMLSFIVLFGLSFIIVCFIFFTTLYFAVNLQKREPKPFQKAAEQTVDTIILIPLSWLFTALYICILFILFPIRHFLDFFQQKR

SEQ ID NO: 9387 - protein, 335 aa, Bacillus licheniformis
MLSLSILDQTPVSEGSKPELALQHTVELAQAAERLGYKRFWVSEHHFSRNLAGSSPEVLIGYLAAKTEKIRIGSGGVMLPHYSAYKVAENFRVLEGLAPGRIDLGVGRAPGGMPIASMALQNGGRRMADQYPEQIQDLVTYLYDQADEHHRFPNLTATPNIATAPAVWLLGSSGESARLAAQTGASYTFAQFINGEGGEEAARLYKERFEPSVLGEQPNVIVAVFVICAETEEKAENLAKSLDFSLLANEQGMVTEGFPSLETALSYQYSPYERKRVEDNRKRMVIGTPQQVKEQLLELAGAYGTDEIMAVTITHDFQDRLDSYRLLAEAFHQSI

SEQ ID NO: 9388 - protein, 55 aa, Bacillus licheniformis
MDKLKELPVLMNETKQKTHPPAVEERFAKGCLFGILFSLPFWLMFYLFLQYMLIR

SEQ ID NO: 9389 - protein, 249 aa, Bacillus licheniformis
MNKTIETILNHRSIRSFTDRLLTEEEVRLLVESAQSASTSSYIQAYSIIGVTHPDKKRKLAELAGNQPYVEKNGHLFVFCADLYRHDKIARKKGVDITASLEGTETFMVSVIDAALAAQNMSIAAESMGLGICYIGGIRNNLNEVSELLETPEYVLPLFGLVVGQPANPSAKKPRLPLDHIYHENVYQADDAEFEKHLSAYDETISNYYQKRTDGKRSDKWTDQITGSLKKPPRAYMNEFVKGKGLNKR

SEQ ID NO: 9390 - protein, 391 aa, Bacillus licheniformis
VKSVIEELDALFPEMIELRRHFHQYPELSHREVNTPRTIANYLESLGIGVRTNVGGQGVVGHIKGGRPGKTVALRADFDALPLQDQKNVPYRSTVPGVMHACGHDAHTSALLTAAKALAKHRKDLKGNVVLIHQFGEEVTPGGAKPMIEAGCLEGVDAIFGTHIWAPMPVGQVGVKSGPMMAAADKFKVTISGRGGHGGAPHLTTDALITGASVVNHLQQIVSRRIDPTEAAVLSIGTFHSGQAFNVIAEEAVIEGTVRTFSKHVQETIIAEIERVIKGVCDSNGASFSLDYEKGYPPVVNHENETDIVRQCAKHVVGPEAVIELEPNMIGEDFSYYLEHVPGSFFFTGAGNPQTGAVYPHHHPMFDIDEKGMLNAAKILVSAALAFLNQD

SEQ ID NO: 9391 - protein, 389 aa, Bacillus licheniformis
MGQKKNTTSPYYQGDLIFILAMFFLISVIAVYAAEPSFSPKGYPAKQLFFYLLGISVIVGFLYFDLEQLEKLSIYIYLFGILSLLVLKVSPESIAPIKNGAKSWFQFGTITLQPSEFMKIGLIMMLASVISKASPKGSRSMQEDVRLLLKIAGVSAVPVGLILMQDAGTAGICMFFVAVMVFLSGVNWKLIFIVAGSGITLVLLVLFLVINFPEFSKDTLHIQQYQINRVMTWVDSSQQDANDTYQTEKAVTAIGSGEIFGTGINNLKVYVPEGQTDFIYAVIGESFGFIGCTFVVIMFFLLIYRLVVLIDKIHPYNKFASFFCVGYTALIVIHTFQNIGMNVGLMPVTGVPLLFISYGGSSVLSALIGYAIVYNASCQLTKYKGYMFK

SEQ ID NO: 9392 - protein, 394 aa, Bacillus licheniformis
MSQKKNITNPFYQGDLIFVYIVFFIISVVAVYAAQQFNQYNEPFAMKQSLYYLLGAFIIIVFLYFDLEQLEKLSFYFYLLGILMLIVLKFSPAYIGSYRFAPVINGAKSWFMLPGFTLQPSEFMKIGLIMYLASFMSKNGPVGKRTLKEDWIFLLKIAGIIIVPFGLILEQDTGTAGIVAFVILVMVFLSGVNWKLISLIFGTGLAAVALILYVIIKFPDVAGALGVEQYQINRVMTWVNPSEQNADDKMQVERAQMAIGSGKVFGNGVSDLQVYVPEAQTDFIFAVIGESFGFVGCTFVVIMFFFLIYRLVVLIDRIHPFSRFASFFCAGFTALIVIHTFQNIGMNIGIMPVTGVPLLLVSYGGSSVVATLLGFAVVYNSSCQLTKYQSYMFK

SEQ ID NO: 9393 - protein, 49 aa, Bacillus licheniformis
MQEDGIRFLTNDMTYKRTKCFDFIANKFLFYFKGFFQLLSNVINSLIFA

SEQ ID NO: 9394 - protein, 451 aa, Bacillus licheniformis
LDKALQKRKRLDIIKFLVPSLIGIILFMIPVKIEGNLTIPIAVFSNALQELLQQQLPLIMTVIVTATFILTFITKTFHPAFIKKSEFFYNLLNVSLFWYIVRLVGMIFAVMAYFKIGPEAVYAKSTGGTLLFSLLPVLFSVFLFAGLFLPFLLNFGLLELCGALMKNLMRPVFKLPGRSSIDCMASWLGDGTIGVLLTSKQYEEGFYTKREAAVIGTTFSVVSITFCLVIISQVGLPHMFVPFYLTILLAGAAAAVISPRIPPLSRKADTYITDQADQDQEKIPEGYTPFQWGLSQAVAKAKQNTSVKDFLQDGAKNVLDMWMGVAPVVMALGTAALIVAEYTPVFKWLGLPFIPLLELLQVPEAAEASQTLVVGFADMFLPSVLGSGIESEMTRFIIACVSVTQLIYMSEVGGLLLGSKIPVTFLDLVLIFLVRTLITLPVIVLCAHFIF

SEQ ID NO: 9395 - protein, 86 aa, Bacillus licheniformis
MDMFFAYLLIASATPLFLWLDNKKVAISSIPPIILMWVFFFFYMTSSLSPTGHSLMIALFILNVVIAHVAAFIIYGLPLIRKHMSR

SEQ ID NO: 9396 - protein, 399 aa, Bacillus licheniformis
MNLIKWILFSVISFAFFQPAPAALLKEKDDYTILVYMIGSDMESDFHMASDDIQEMMDAGSSSNVNVVLQTGGAKKWANPSISHKVNQRWKVEHQKLVPLENVGKKNMDSPGSVTDFITWGVKTYPAKKYVLIFWGHGLGSVDGYGGDENFGNKKMKISELQSGIKTAYEHTKQKFDLIGFDNCKMAGIETAYALRDYGKYMLASVDYTNQNGWDYKRALQSVQDDPSIDPKELGREIAAGYVQQSKENGETEDLQQSLIQLNRVKDAVDALDRLSVNMNLALKEPDGKRLLHYARLAAEDYADESDMVDLADLSSLIGQQIGAEKEAKEVVKSVKKAVIMNIKSPEHPRGSGMSVYYPARDNHKRFAEKSKIYRLLDFSSRYQTFIKDYSHSTFNFDL

SEQ ID NO: 9397 - protein, 151 aa, Bacillus licheniformis
MSNIEELRLFRKEDIEWLQTWFEDAEVKRRLEGMLPLDEWFNFAGGNENYRVWAALEDGKPVGVVMVEVEEDLTGNIALLVDPFLRGGGYGKALIKRTMALPEMSRINKWFAGIEEDNKRCLACFRSVGYSLEHEQPDEDCYYSLIYFPES

SEQ ID NO: 9398 - protein, 602 aa, Bacillus licheniformis
LLKFYSFSKKLPQTASIIFYGLTLFWRCDPFKSAVLFLITLLNAMLGPLLVWLSAEVIDEIARAPFELSSWNALVWAAFAYIAFTLIVDALQPVAEMQKRLLTAKLEAYLDEMLMKKAISIPDIAAFEDASFHTNTQIIRYNEYFVTMWVSIVSQTFGGMVMIAASSLLIGMAAPWVPLLFLILAVPKLYWEAKLNNATFEGRKEVQELRRRAEYYAGVPLMSETAGEVKIYNLVPFFKSFYKNTSMELLHTLSNDQKKLALYQLFWSVLQSLAAGAVLIYIVHQAFHGGLSIGDVMLFIGAAVQFNEGINEMFAAFAIGARETRHLGNVHSFLNSKNSMENGETAPAVQKQKGFTCDQVEFSYDGTKTVLDIQQLDIPLNKTTVLVGENGSGKSTLVKLLLRYFDPNQGTISYNGLPLYKYDIEHYRSNAAAVFQDFLRYEMTLKYNIGLGDISSCTDLAKIKSASAFGGVDQFLHKLEDGYETELGRLFGGRNLSGGEWQRIAISRAFMRDESADILIFDEPSSALDVFIEEEIFDKLQKLTQGKTVIIVSHRLSTARFADHIIFLEKGRVAEAGTHQELMKNQAQYAELYRLQAEKYAQ

SEQ ID NO: 9399 - protein, 644 aa, Bacillus licheniformis
VWKMKHIQEPLQTAGLLGKMVWKSGPRLMICMVIFMLIEAGAPLIQLYVSKQMIDGIVDQEAVIYPEIWAVIYAGSLVMVSVVKSLEKWVKAMLSERSMITVNSLLIDAFDRIPGMRFFEDPKYRDRLETLRDRSTWLPSQFINISSNLVTAVMSLAGVVLIIAYLSPVLAFILILSTAPFAFVHNHYNEMEWEYHKDYAPVRRRAAYARHILLGRRSAKEVRLFGLGSFFLDLYQSAFKGLYSVLRNIQVRSARWSVLTGFLSGAGTGLGYFWILSQSHSSSFSVGDISLYLGAVFQLSTALRDIAKEGADTLDIWRMGRDFFLFMNAEKDIRLPSNGESLEGEGPLAVEFKNVTFRYPFREAAAGSRVNEADVDEEDLDMLDELEDEEMRGQDEQPESYDMHTGDVLNRISFSVSPGERIAIVGANGSGKTTLIKLLCRFYEYDEGEIKVNGKDIRKVDLQQLRNKMAVVFQEFGRYELSLRHNIAIGRTEALGDEEKLRAAARAAKLEPIVEELPEGLETMIGPEWGGTDFSGGQWQRIALARSFMKDAGLVILDEPAASLDIRAEYDIFRQFQSFTEGKTVIMISHRFSTVKMADRILVLKNGRIAEEGSHQELMDKNGEYSRMFRMQAKSFQGKDEVYC

SEQ ID NO: 9400 - protein, 666 aa, Bacillus licheniformis
MKIWFGMQGNNTALWQEWVSAVKKWGRAERIHSYSCGIANMAEAHIRYDEAFRPSTQINLLHPVILDGWISGGLNAKSDGTRKIEQYDKLYASLKQDKAAMLSHSHGEYTMVWWDDSLHSLVLATDTYATRPVYYWVSPKGEWYAANDMRILLLVHDIPFAIDQDVCRMFPTSGFAVGENGFEDRTFFKGIRKVPAASYAFLGRDQAVHVHSYWGLPQLLNEKDLAGDAVPRFRELFQEVTADRLKDERHIVELSGGLDSAAVTAAAVAGGRKEQLLAVNISFAEPDMILSHDRDLVKNMMRDMDIPGLIILGDATAKIPNAEIGRDPLWFVDGPDPRANSLVNETFTVIAEEYGASSVLTGEGGDFIFSGEVSVIDSLLRQRRFSEIYKLLREWSGGSMKEMLKLGFQYGIAPFMPYIGEKLYYDLLWSDTEYELPEYFTEEHRKREWEINKEDHLRYRKSRELSVWGKRFHYDFLWPRARYMDAVGVTLHTYHPFLDRRLIEFSFSVPPEQHFDVLKGLDEHYAGSKMLLRKSFTDILPAYVYNRSTKTTYAHMARKSFMNDRRHVLQLFEPGERVFVEELGIIKRDIWWKHLLAMAIRSEDPNNDLGMGYQYMRSVIDLEIWLREASKGKEHLLDRSRPVKPRVMADIETVNTPEKAKIYSYQ

SEQ ID NO: 9401 - protein, 154 aa, Bacillus licheniformis
MKKRALVKNHEYFTTVHAFVRMMLLNYDFEEAYEKIAIHLFPLYASAKQRGAGLLDIDELHRNGEYLYSLDEDDHLVTSCVSIALTIQSILFSNGSDADLMIGVKKIDDKLFSHAWVQMENGKSIDPNHKNKNLKVLQTYKMSAYAERWVLSLV

SEQ ID NO: 9402 - protein, 90 aa, Bacillus licheniformis
LKIIRNQETATTVLENECIVLNLDNGQYFGLEGALKELWIEIENERKDKKDILIKWQSAFDQTEEELSAILNEAIQELTHHKLIKIEDKS

SEQ ID NO: 9403 - protein, 210 aa, Bacillus licheniformis
MIRVLLVDDYRVLTSGMKEILKKYNMDVIVCHEGNEALDLLKNQEVHIDVFLYDLKMPGMNGLELSLKTLEIEPQSKIIIMFSGDEIHSYFNKLIEAGVKGFIDKSYTDSMIASSILLCLKGAVLFPDGLLQKLRLDSDLSVDEHLTDTELDILQKVASGKTNKEIAADLQMSTRNVEYHLSKIYKKLKVTSRYCAVKKGTMLNLIKQKV

SEQ ID NO: 9404 - protein, 38 aa, Bacillus licheniformis
MRKLESAQVKSYGSFLTVTLSKKSKPGDGKFGRGVKRG

SEQ ID NO: 9405 - protein, 121 aa, Bacillus licheniformis
MAAKQSAEHSHFPWKHIVGFVLSIVLTLLALWVIYTDLSMAAKLWIIFGFAIIQAGLQLLMFMHMTESDSGKIQVGNTLFAAFIAVAIIAGSVWIFAAHNYHGDNPEGGSPGAKHSEHSGH

SEQ ID NO: 9406 - protein, 204 aa, Bacillus licheniformis
MEHAEHSNSNAPMEYRSEIGRLNILGFWIFLGAEIALFSTLFATYAVLHNRTAGGVLPAELFDAKLVLIMTFLLLTSSFTCGIAVHEMRRGSLKGVMIWMIITLLLGAGFVSYELYEFNHYVHEGATLSTSAYWSAFFVLLGTHGLHVSIGIFWIIGILLQTKKRGLTPQTSAKLFISSLYWHFLDVVWIFIFTGVYLIGLVNV

SEQ ID NO: 9407 - protein, 649 aa, Bacillus licheniformis
MNLKWDEFIITGDPLILGAQISILLTSIAIVFVLTYFKKWKWLWREWITTVDHKRLGIMYIIAAVIMFFRGGVDGLMMRAQLTLPNNGFLDSNHYNEVFTTHGTIMIIFMAMPFLIGLMNVVVPLQIGARDVAYPYLNNLSFWTFMVGAMLFNISFVIGGSPNAGWTAYMPLAGNELSPGPGQNYYLLGLQIAGIGTLLTGINFMVTILKMRTKGMTLWRMPMFTWTTLITCVIIIFAFPVLTVALALMTFDRLFGTAFFTLANGGMPMLWANLFWIWGHPEVYIVILPAFGIFSEIIATFARKQLFGYKAMVYSIVAISVLSFIVWLHHFFTMGNSAAVNSFFSITTMAISVPTGVKIFNWLLTLHRGRIKITTPMLWSLAFIPNFVIGGVTGVMLAMAAADYQYHNTYFLVSHFHYVLIAGTVFACFAGLIFWYPKMFGHKLNERIGKWFFWLFMTGFNICFFPMYFLGLQGMPRRIYTYGAEDGWTALNMIATFGALLMAAGFIVLCYNIFYSFRHSKREESGDAWGMGRTLEWATSSAIPPHYNFAVLPEVTSPDAFAQMKEDNVEIHPESKFKKIHMPSNSGRPFIMSLCFGFAGFGLVFEWFWMGIVGLIGVFLCMILRSFEYDDGYYVSVEEIKETERKNAK

SEQ ID NO: 9408 - protein, 319 aa, Bacillus licheniformis
LFRAFKPLIMLTLLSSVFLLGGCSQIAVLDPKGPVASQQRDLILLSIGFMLFIVAVVFVLFTVMIVKYRERKDRKSPYSPEVEGNTFLEIVWTVVPILIVIALSVPTVQTIYSLEEAPKASKDKEPLVVYATSVDWKWVFSYPEQDIETVNYLNIPTDRPILFKISSADSMASLWIPQLGGQKYAMSGMEMEQYLQADHEGTYKGRNANFTGEGFAEQKFNVNAVSESKFNDWVKKTQKEAPKLTKTQYDELMLPQHADEMTFSSTHLKYVNHGNDAEYAIKARERLGYKPLSPHSKSDPFENVKTNKDQKQSEDQDSH

SEQ ID NO: 9409 - protein, 329 aa, Bacillus licheniformis
LAILVCGGAGYIGSHAVAELLSRNEDVVIIDNLQTGHEEAALKGASFYNGDLRDEAFLRKVFQENDIEAVMHFAADSLVGESVTDPLKYYDNNVYGAVCLLKVMKEFDVKQIVFSSTAATYGEPDRVPIMETDPTDPTNPYGETKLAIEKMLKWSEKAYGIRHVVLRYFNVAGAHVDGLIGEDHQPETHLIPIILQVALGKRDKIMIFGDDYPTPDGTCIRDYIHVMDLVDAHILAVERLRNGGESAVYNLGNGTGFSVKEVVETARKVTGCPIPAEVAERRAGDPAQLIASSEKAVKELGWQPKYAELETIIDSAWKWFKAHPNGYQS

SEQ ID NO: 9410 - protein, 35 aa, Bacillus licheniformis
LLFSFYHLQHFPACIFIISSNKKLGEKRIERPSFH

SEQ ID NO: 9411 - protein, 33 aa, Bacillus licheniformis
MKEAKKLGLQIEDVKEFLRSQPIQSDAEKQIKQ

SEQ ID NO: 9412 - protein, 72 aa, Bacillus licheniformis
MVSKGLRPKAPPPFRRKAIETDTEESVWGCWHQRWSAMPLKRLNQSGLVPLKRVKLEKVKQPMYRAKGKAAP

SEQ ID NO: 9413 - protein, 30 aa, Bacillus licheniformis
MMNMGIAAICGSSRENGNTEELVNRLGRRT

SEQ ID NO: 9414 - protein, 104 aa, Bacillus licheniformis
MGEGKIDYSKAAASPEFQRLLKRKRAFIVPMTIFFLLFYFLLPVMTSYFTFLNQPAVGAITWAWVFAIAQFVMTWTLCIVYTKKAGQFDQIASDFKKKIGGVDS

SEQ ID NO: 9415 - protein, 512 aa, Bacillus licheniformis
MSATAFILFLAIVALTLVITYFAAKQTKTANEFYTAGGGLTGIQNGLAIAGDYMSAASFLGIAGMIALNGFDGFFYSIGFLVAYLVVLYIVAEPLRNLGKFTMADMIASRFKQKKIRGVAALNTITISTFYMIAQLVGAGALIKLLLGIDYTLAVCIVGVLMTIYVVFGGMIATSWVQIIKAVLLMAGTLIISVIVFSKFGFSLTNMFEQMKTATPLGADFLNPGNKYKVPLETLSLNLALVLGTAGLPHILIRFYTVKDAKTARKSVVSATWIIGIFYIMTVFLGFGAAAFVGFENILAADKAGNMAAPLLAQALGGDFLFAFVSAIAFATILAVVTGLVLSAASAFAHDIYSQIIRKGAATEKEQMIAARWASIGVSVLSILLAVFAQSLNVAFLVSLAFAVAASANLPLIIFTVFWKRFNAAGALAGSLTGLLSALILVSISPSVWDPAGNAIFVGDPLIPLSNPGIISIPLGFLGAYLGTILSSKTPGQDAFAEIQVKAHTGIHMDQS

SEQ ID NO: 9416 - protein, 499 aa, Bacillus licheniformis
VEYVIGVDLGTSAVKIILVNQRGELCGEVSKPFSIIQPHSGYSEQDPAEWAVKTKEAIKELVMHFPGKASQIKGISFSGQMHGLVLLNGKGEVLRNAILWNDTRTTEQCRLINEKVGKERLLEIAKNPALEGFTLPKLLWVKEYEKELFEKAAVFLLPKDYVRYTMTGRLHSEYSDAAGTLLLDVRHQTWSGEICRKLGIPESLCPDLIEPGACVGGLRPEFAAETGLSPEVKVFAGGADNACGAVGAGILKEGTALCSIGTSGVVLTYESNRDQEFNGNIHFLNHAAPDAFYSMGVTLSAGRSFSWFKDVFAGQASFDELISDIGHSRPGAGGLLFTPYLSGERTPHADADIRASFIGMDSAHTRADFVRAVIEGITFSLHESIEQFRAGGKDISRVISIGGGAKSNQWLQIQADIFNADIIRLTSEQGPAYGAAMIAAVGCGWFPSLEACADRFVLIKETFSPRREYSRQYEALFQIYRDVYRHTKTLNERLASFRE

SEQ ID NO: 9417 - protein, 448 aa, Bacillus licheniformis
MFFRNIGMIEYEGADSENPYAFKYYNPDEFVGGKTMKEHLRFAVAYWHTFDADGKDPFGDGTMFRAWNRLTHPLDKAKARAEAAFEFFEKLGVPYFCFHDVDIVDEGATLRETFTYLDQMSSFLKEMMETSHVQLLWNTANMFTHPRYVHGAATSCNADVYAYAAAKVKKGLDIAKELGAENYVFWGGREGYETLLNTDMKLELENLASFYRMAVEYAREIGFDGQFLIEPKPKEPTKHQYDFDAATTIAFLETYGLKDHFKLNLEANHATLAGHTFEHELRVAALHDMLGSIDANQGDLLLGWDTDEFPTDLYSAVLAMYEILKAGGFKTGGINFDAKVRRPSFADEDLFHAHIAGMDTYAVGLKVASRLLEDKALDQIIEERYESYTKGIGLEIKEGRTDLNKLAAYALEHDQIENQSGRQERLKATVNRYLLNALREAPAEKETR

SEQ ID NO: 9418 - protein, 387 aa, Bacillus licheniformis
LNTADQALVKKMNKALIFEQIIENGPVSRAKLSEITGLNKATVSSQVSSLLQKDIIYETGPGESSGGRRPVMLKFNRKAGYAVGVDVGTNYIIVALTDLEGHLIEQFERTLDEEDIQATEEALIELTGLAVDKIPPSPFGLTGIGVCVPGLVDNERHVVFTPNKPIHLIPIKEKLEERFGVPILIENEANAGAVGEKEYGEGGQLEHAVFVSINTGIGLGILMNGKLFRGVQGFSGEAGHMSIHFDGPLCRCGNRGCWELYASEKAVFSHYAANSGAQLYETVKELADRGDPGMMETFERFGFHIGIGLLNILKTLNPDTIILRNTIVESYPSIVDAIKKTIASRSAAEALSNYHLKISTLGRTASALGMSSLVTERFLERFMNERF

SEQ ID NO: 9419 - protein, 49 aa, Bacillus licheniformis
LQIVDKIPKRLFVLGFYHPFSVIENPCSLGRSSIGAERMLEFVSTDAQA

SEQ ID NO: 9420 - protein, 224 aa, Bacillus licheniformis
MTRVSEEAMKDLLSVYFIMGSNNTAGDPLTVIEKALKGGATLFQFREKGEGALKAGDQTAFARQVQALCKQFNVPFIINDDVELALELDADGVHIGQDDDKAADVRARIGDKILGVSAHTLEEVLKAEKDGADYIGAGPVYPTETKRDTKAVQGVSLIQEIRRQGIGIPVVGIGGITVENCVPVIEAGADGISVISAISKAADPKQAVEAFSEKVQAAKQSAHS

SEQ ID NO: 9421 - protein, 269 aa, Bacillus licheniformis
MNMEDAARGIELVRKQKPLVHNMTNNVVTNFTANGLLALGASPVMAYAREEAADMAKIAGALVLNIGTLSRESVEAMIIAGKSANEHGVPVIFDPVGAGATPFRTESAQAIMRKVKVSAVRGNAAEIANTLGEDWLIKGVDAGEESGDRTELAKKAAKLWDTAVIITGAEDVITDGTKTYTVGNGHQLLTKVTGTGCLFTSVIGAFCAVEKDVCRAAVSAAAFYGTAAELAAAKTESRGPGSFQIEFLNQLAAVEAMDIKERGRIREVE

SEQ ID NO: 9422 - protein, 305 aa, Bacillus licheniformis
MDIRHLTYFLEVARLKSFTKAAQSLYISQPTISKMIKNLEEELGIELFYRRGRQIELTDAGQSMYVQAQEITKSFQNLTSELNDLMDVKKGHVRIGLPPMIGSGFFPKVIGDFRDKYPNVTFQLVEHGSVKVQEGVEDGSLDIGVVVLPAKEEIFHSFTIVKEDLMLIVHPSHRFADEEEIELRQLSEEPFIFFREDFVLHERIITACLKAGFQPNVIYETSQWDFISEMVSANLGIGLLPERICRDLDPERVRIIPLVRPAIPWHVAVIWRKDRYLSFAARAWIDHTKSYIWSENSKTERNAGE

SEQ ID NO: 9423 - protein, 89 aa, Bacillus licheniformis
MSKTIKLNHAAVMKKLEQVSSTLQAVSLKSPPAGALGRNNLDFTKKWLEREAEICNMVKQYKEAVRKNIEDTRSNVDTLKEQDEAIARR

SEQ ID NO: 9424 - protein, 142 aa, Bacillus licheniformis
MDYSDTLQKIHGVLSHKAAELEEQIARLERAKRDVEREQNLGIEEIRQILRPNLNESWTGSRAADFNEARDEAHTAMYRIFTDEYDRYIHKIDLKIFALDAEKGAVQAASWSADRADFLMEKGEEAVDALHSTINGLKGWLK

SEQ ID NO: 9425 - protein, 128 aa, Bacillus licheniformis
MKTFIKGLGQVALLFLFARFMNLIVEVLHINIPGSILGIIVIFALLHFKIIKLEWIEIGALWLLAELLLFFVPSAVGIMNYGDILAEFGTSIILVVLISTFVVMVSTGMLTQLIAKRKERKKTCSSDA

SEQ ID NO: 9426 - protein, 227 aa, Bacillus licheniformis
MLIGCLSLIATVLIYLGAKAVYSRHPKVYASPLLVTPVILVGLLLFINVPFEAYNAGGRLLTDMLQPATVAFAIPLYKYFPVLKKYAVEIIINVAVGCCIAILSTAFIAKLFKLNEDLIESLVPRSVTTPIAMNVSEMIGGMPAVTAVFVILTALFGSVIGPMVIRYFRIDNEIARGVLLGTSAHGAGTSKAFELSSVSGTISSVSMILAAIITLCAAPFLISLIAV

SEQ ID NO: 9427 - protein, 139 aa, Bacillus licheniformis
MAFVKVLLTTAFLTGAFAGFLWAFSKEKGDGFFSEMAADGSGVFTLFGLIGLLNVKLLKAISPKLLHDRSFRCISFILAVVLIDDVYIHMADRFLNEKTKLAEKPSPIWFFFRLLHCNKGNQKRRCAKRDDRGQDHRHA

SEQ ID NO: 9428 - protein, 488 aa, Bacillus licheniformis
MNYGILISIGIYMAGMLFIGYFAYRRTSNLTDYMLGGRNLGPAVTALSAGASDMSGWLLMGLPGAMFLNGLSSGWIVVGLTIGAYLNWVYVAPRLRTYTETAGNSITIPDYFENRFKDGSRLLRMTSAFVILVFFTFYTSSGMVAGGELFRTAFHLDYRIGIWLTAGVVILYTLFGGFLAVSWTDFVQGTIMFIALILMPVVVFVQLGGIAPAFSEVNAVNPDLLRPFQGTTVIGIISLLAWGLGYFGQPHIIVRFMAISSVKELKSARRIGMGWMIFSICGAMLTGLVGIAYFSANHLTLKNAETIFIKLADLLFPSMITGFLLAAILAAVMSTISSQLLVTSSALTEDFYKAFIRKGASDKELVLVGRLSVLAISLIALLMALHPNETILNLVGYAWAGFGAAFGPVVLLSLYWKRMTKWGALAGMLSGALTVIVWEQVKAFDPVYEIIPGFIVCTVVIIAVSLMTKKPRAEIEKEFETAVEQLKG

SEQ ID NO: 9429 - protein, 396 aa, Bacillus licheniformis
MHTLKIKHPFAAKMKKGYPLIEKEAVSSQENGIKEGSLIRITDENGRFLGKGYYGEQNKGIGWILTRNEGESIDQSFFLSRLAKAFQARKSLFQDPDTTAFRLFNGEGDGIGGFTIDYYDGYYLFQWYSKGIYTLKETIMEALDELTDYKAVYEKKRFNTAGQYVEDDDFVKGERGDFPIIVKENGIHFAVYLNDGAMTGVFLDQRHVRKAVRDRYAEGKTALNTFSYTGAFSVAAALGGAEKTTSVDVANRSLSRTIEQFSVNGLDYEAHEIKVMDVFKYFQYAAKKELAFDLVILDPPSFARTKKHTFSAAKDYKNLLKDAIRITKDQGVIVASTNSSAFGMKKFKGFIEEACKETGTRFTVLEEHSLPEDFKTVKSYPEGDYLKVVFLQVRHR

SEQ ID NO: 9430 - protein, 126 aa, Bacillus licheniformis
MARIDHVGLMVKDIDASIAFYQNVIGMTLKGRMTHTNGVMKLAFLGFENRDETELELIEGYNDNLPQEGKVHHFAVSTDDIEAEFDRVKGAGIKLMEDEITVLPNGFRYFFLFGPEGEMVEFFQRT

SEQ ID NO: 9431 - protein, 315 aa, Bacillus licheniformis
LVKVLLTLNGLFYRAAPRLRERVERLGAEFAFLDSNRLTRQDLLTHIKDVHIYIAGVEKADRELIDAAPGLRYIMKFGAGINNIDVEYANEKGILVTNAPGQNASAVADLAFGLLLSGARSIPQSNAAVKAGLWQAAMGYELDGKTLGLIGFGEIGKKVARRAAGFNMNVLAYGTYKDYNAAKRLNVRFAELDDLLEKSDFVCISTSLRPATYHLINQEKLAKMKKTAYLINIARGEVVDESALIQALEQKQIRGAALDVFETEPPAARIAGLSNVICTAHIGGATYESIRRIEEMTYQNIKRFIEKQQPAFRVQ

SEQ ID NO: 9432 - protein, 287 aa, Bacillus licheniformis
MKSDRTMHIISCTDNNYAQHLSVMFSSLLTNMDQTREVKLYVIDGGIEPENKKRLEETTLQFGAPITFLNVEKSQYDKAVESSHITKAAYYRISIPDLIDDESVKRMIYVDCDALVLEDISKLWDMDISPYFAAAVEDAGQHERLKKMNISDEAKYFNSGLMIIDMEAWRKNDISKKVIDFINNNDEDMFVFHDQDALNAILYDQWLELHPRWNAQTHIILKEKTPASLIDQKRYMETRANPAIVHFCGGNKPWNSNTSHPYARQYFKYLQSTAFNQPAKLSKNHVS

SEQ ID NO: 9433 - protein, 44 aa, Bacillus licheniformis
MILFFFGLSTVFIFRKKGIEQKKKRRWTTYEKRPNHAYYFLYRQ

SEQ ID NO: 9434 - protein, 56 aa, Bacillus licheniformis
LKSIDLTILSLKRKGIRTEKVSKNQCPDRLSNANEKTDKHRYKNRQSKNKRKEKEE

SEQ ID NO: 9435 - protein, 41 aa, Bacillus licheniformis
MNIAQTYICILPLCTFYLSKFTFEIMRNSLLIKGMINIEID

SEQ ID NO: 9436 - protein, 1 aa, Bacillus licheniformis
C

SEQ ID NO: 9437 - protein, 212 aa, Bacillus licheniformis
MNKVLIVDDHLVVREGLKLLIETNDHYIIIGEAENGKAAVRLADELKPDIILMDLYMPEMSGLEAIKLIKEKHDIPIIILTTYNEDHLMIEGIELGAKGYLLKDTSSETLFHTMDAAIRGNVLLQPDILKRLQEIQLERMKKQSSDTQLTEKEVIVLKAIAKGLKSKAIAFDLGVSERTVKSRLTSIYNKLGANSRTEAVTIAMQRGVLTLD

SEQ ID NO: 9438 - protein, 374 aa, Bacillus licheniformis
MSKMLYKLGGWVARNRIKVICAWIVVLVASIGLAITLKPSFSEDMSIPDTPSEKAMDVIQKEFPHGPDKGSIRVIFGAEDGEKLTSKSAEKAIENTLKEIDKDGSVDSIASPFVTGTIAKDGTVAYADIKYKSSADDIKDYSIKHLKDSLKMADYEGLQTELSGDVPGAEMEIGGISEIVGIILAFIVLAITFGSLLIAGLPILTALIGLGVSIGLVLIGTQVFDIVSVSLSLAGMIGLAVGIDYALFIFTKHRQFLGEGIQKNESIARATGTAGSAVVFAGLTVIVALCGLTVVNIPFMSAMGLTAGLSVLMAVLASITLVPAVLSIAGKRMVPKANKKKEKQSAETNVWGRFVTKNPIMLFLPPFLYGFFIG

SEQ ID NO: 9439 - protein, 317 aa, Bacillus licheniformis
MDVISIGETMALFTPNEDGPLRYARNYQVRIAGAETNTLIGLSKLGKKAGWITRLGKDEFGAMILSSVRGEGVDVSQVKLDDAAPTGLFFKERKSAAKVNVFYYRTLSAASFLKKCDIDEQYIEKAGLLYITGITPALSESASDAVFYAVELAKKHNKCVVFDPNFRKKLWDGERARQTMFELIKRSDIVLPGLSEGRFLFGTADEKKIAEAIRGLGAETAIIKLGSKGAYYAGGNESGYAEGYQIQAAADPVGAGDGFAAGVLSGLIDQIPLSEAVKRGCAVGAMVAAVNGDIEGLPDRESLFAFMEQSDEEDVSR

SEQ ID NO: 9440 - protein, 252 aa, Bacillus licheniformis
MSVKSAVRVVRIFELLSNHPDGLTVKEISKELSLPQSSTFNLAATLLDEGYLQQDAVKRYRLGAKLIQVGTAAMESIDISSQGVPFLKQLMDGVQETVFMAVLSDDQLVYIAKIDNNRSIRTTAQPGSRKPLYCTGLGKAFLAFMPEDKTEGLLDRMEFIRFTGHTITAREELEKQLQTFLEQGYAVDNEENEEGLFCLAAPVYGPDGVMKAAISTAGPKERMLARKAVIVEQLLHTAGKITESIGGYRKPL

SEQ ID NO: 9441 - protein, 449 aa, Bacillus licheniformis
MKRKMMMFGLALSIIAGGVVADGTGNAAQAASQETAIAKDIEKFSKKFNENRAYQTIYHLSETIGPRVTGTAEEKKSAAFIASQMKKSNLKVSTQKFSIPDRLEGTLTVQGNNVPARPAAGSAPTAAEGLAAPLYDAGLGLPGDFTEEAKGKIAVILRGELTFYEKAKNAADAGASGVIIYNNVDSLVPLTPNLSGNKVDIPVVGVKKEDGEKLLSEQEAILKLKAHKNQTSQNVIGVRKAKGVKNPDIVYVTSHYDSVPYAPGANDNASGTSVVLELARILKTVPADKEIRFITFGAEEIGLLGSRHYVSTLSNQEVKRSVANFNLDMVATSWENASQLYINTPDGSANLVWQLSKAASLSLGKDVLFLHQGGSSDHVPFHEAGIDSANFIWREPGTGALEPWYHTPYDTIEHISKDRLKTAGQIAGTAVYNFTKKENRKPSYSSVAQ

SEQ ID NO: 9442 - protein, 453 aa, Bacillus licheniformis
MAGLKKNRALFLTAVASGTMLNPLNSSMISLALHSIQHEFHLSFATVSWLISSFYLASAVAQPVTGKIGDLIGRKKMFLSGLVLVAVSAIGAPLAPAFSVLLIMRLFQSIGSGAIYPSGVGLIRSHIHEKQASALSVLSIFSSAMTAFGPTVGGFLIVLGGWPAIFLVNFPFILFSFLLGMYMFPKDEKKAGLNVRAVIKRLDLTGILLFAGGIVLLLAFLLSLSTGEPRFAEGMFGLVLLLMFVWWELRVNSPFIDIRLLIARRTLTSVYAQFIMLNIFNYCLFFGLPSYFQDEMHLSVQTSGLLMLFMSGTSVLISPFVGKWIDRSGETQPVLIGSCLMAAGAILLTLFFVDAPMLWKGIILSLLGVSYGLGNVALQAAMFTASPPDIVGTTSGLFQTCRYLGSIFSSVILGLLFGEEITAGHFQDLGMVMIAVAIGSILMSFRFIKLMKD

SEQ ID NO: 9443 - protein, 70 aa, Bacillus licheniformis
MKSDIEKRAECGLQNGTEAMMNRESQRLDAALYGAVLNAFGCDDRSRLMSGEAGAGGKAGGAGERLLYPK

SEQ ID NO: 9444 - protein, 38 aa, Bacillus licheniformis
VKSSKKLISTLTKEERHRRAMISKTKSGKKSSVLPEIK

SEQ ID NO: 9445 - protein, 219 aa, Bacillus licheniformis
MDMAIDKMIGLPEAQIEDLRNLMEDWKNELLVYKFALDQMDTKFSIISQEYNLIHGHNPIEHTKSRVKSFESLINKLVRKGCDITTKAAKEHIKDIAGLRIVCSFLSDIYNMVEVLKEHEDIKILKMKDYIKNPKPNGYRSLHLIVEVPVYLTNRVEHAKVEIQIRTIAMDFWASLEHKIYYKLNNEVPNQLTDELKEAADIANYLDEKMLHIRTKADQ

SEQ ID NO: 9446 - protein, 77 aa, Bacillus licheniformis
VGEFLFPSAVSRQLRAYPIINIFCYCGNKFFLNYKKTGSYEKRSAFRYEPAVFRKKASCANELILYKSGAHNDQQNK

SEQ ID NO: 9447 - protein, 49 aa, Bacillus licheniformis
MLNKLRMLYEKTTMKWLLNTSYYFLILVLLFLIYGFHTANTGSYIYNDF

SEQ ID NO: 9448 - protein, 502 aa, Bacillus licheniformis
MKLIETIKKYAQTQPDTLAFVNEEEKLTYGELWSQSERLAARIQSEALTDASPIIVYGHMKPVMAVSFLACVKAGHPYIPVDVSIPADRILKIINSSKAELLLNNSGTSVDTGDALISVVEPGVLEGDGVPETDPGRWVHGEDTFYIIYTSGSTGNPKGVQISADNLQSFTDWITNDFPVESGQVFLNQAPFSFDLSVMDLYPCLQSGGTLWTVTKDMINRPKLLFEALKQSNVNVWTSTPSFAQMCLMDPSYSEELLPELSLFMFCGETLPASVARQLKERFPKARVFNTYGPTEATVAVTSIEVTDDVLNKYSSLPVGSEKPETEIVIINEDGKAVQDGEKGEIIITGASVSKGYLGEKALTEKAFFSYNGSPAYRTGDAGYKENGQLFFLGRLDFQIKLHGYRIELEEIEYQINQSRYVQSAVVIPFYREEKIEYLIAMIVPAEHDFEKEYQLTSAIKKDLGSKLPAYMIPRKFMYQKEIPMTANGKIDRKRLKEEVTV

SEQ ID NO: 9449 - protein, 385 aa, Bacillus licheniformis
MTPYGSFLFFIILGILLAPTIILGLNGKSFRLYNMAVSVLVLALIFSNSLHGLIMLCLFTLWQTVLIKGYIAYRLKANSGIVFCLAAAASILPLALSKLLPFFAVDNWATFLGISYLTFKGVQLIIETRDGLIKKQLPISRLLYFILFFPTISSGPIDRYRRFEKDDQTVWTKEQYEELLYKGINKIFLGFLYKFIIGYCINTYVIMKLPFLTSGSFSHGLAYMYAYSLYLFFDFAGYTAFAVGVSYIMGIKSPENFNKPFISRNIKDFWNRWHMSLSFWFRDYVFMRFVLWMTKKKWITNRMAVSNIGYVLLFLLMGVWHGLAPQYIVYGLYHALLMVGFNFFEKWNKKHKWWPNNKWTTAVSIVVTFHFVCFGFLIFSGKLIH

SEQ ID NO: 9450 - protein, 78 aa, Bacillus licheniformis
MDFNQEVLSVLAEVCQDDIVKENPDIDIFEEGILDSFGTVELLLAFESHFNITVPITEFDRDAWNTPNQIIKQLNELR

SEQ ID NO: 9451 - protein, 389 aa, Bacillus licheniformis
MKKRFLFGPIILAFLLFFTAILIPNAWLTKLVPKDRVETSATELNPMMFQGMYLQGKALEDPKYLPIFGSSELSRLDAFHPSNYFKVNNQGFTPYLVGKGGSQSLIHAINFAAQSDQLKGKKIVFIISPQWFQKHGSDEAHFAPNFSALQAYDLVFNQNVDSGLKKKIIKRMLKFHAVKNDALLSALFKAELDQDKVALSLLTPPAKAYQSILEKKDIYYSMVEGDGPKRTISQDVKNKSWDELKQMAEKVGAKESRNNEFKISNGVYKKLKPKLKKLKGHNKKMNYAESVEFHDFHLMMDVLKESGAEPLFISVPVHGKFYDYTGFPKKGRTDFYKKIKKEIEQEGFQVADLTNHEYDPYFLKDTLHLGWKGWVYVDQEIEAFYKKSS

SEQ ID NO: 9452 - protein, 363 aa, Bacillus licheniformis
MTKQTISVQLSTAKKQKPEADKLEFGRTFTDHMFIMDYTAENGWHDPRIVPYQPIEMDPAAMVYHYGQSVFEGLKAYLSSEGRVLLFRPEKNFERLNKSNDRLCIPRVDPEIVLEGLKQLVQIDKEWIPQAEGTSLYIRPFIISTEPYLGVAPSNMYKMLIILSPVGSYYKEGIRPVKIAVESEFVRAVAGGTGNAKTAGNYAASLKAQEVAESKGFSQVLWLDGVEKKYIEEVGSMNIFFKISGEIVTPALNGSILEGITRNSVIHLLKQWGLSVTERKISVDELVQAHKDGLLEEAFGTGTAAVISPVGELIWKDESLVINNGQTGEIAKRLYQTITGIQKGALPDTFGWTVEVDKVSQSC

SEQ ID NO: 9453 - protein, 56 aa, Bacillus licheniformis
LHPYRKIRRRQALFPPYLPLFQSDLQSLPHKTIPFYILYVKIINNHAGKERLSVLM

SEQ ID NO: 9454 - protein, 420 aa, Bacillus licheniformis
MDQTKLSVWEKNYTFLFISRLIKISADCFAFNSILWFLIFDGKGAIGTSLLLAVTFLPEAFLAPITGPLVKRSALKFWMYFSDLTRAAVVITIPICYLNGFSPMWFVLGLMIIHSATGATYNPASITLIPQIVNENLIQKANAILQSSSEIIRLGAVTLCGVLLTFIGPATTLVFSFIFYIISGLFMLCIKYSITRTHSQSKSLAQRGTYFARLKRGFTLVKNHKILYPLAIYCIFMNLAASPWEALSAVYVAEDLNGTPFIHSLLKATTAGGAFLLGFILAKVKINRYGLLFITAGILEGAAYFIAGLNTFLPLVFLAAFAFGAAISSINVPEFTIIQTSVEGDDQPQVFAVIHMITNLSLPLGAIACGYAAKMLGAGNVIAIGGFIEIIAGIGILIFTQLARARRSDLIKEKEASANM

SEQ ID NO: 9455 - protein, 442 aa, Bacillus licheniformis
MKKGLKIVTIGGGSSYTPELVEGLIKRHDELPVSELWLVDIPEGEEKLNIVGTLAKRMVEKAGVPIKVHLTLDRREALKDADFVTTQFRVGLLEARAKDERIPLKYGVIGQETNGPGGLFKGLRTIPVILEIAKDIEELCPDAWLVNFTNPAGMVTEALLRYSNLKKVVGLCNVPIGMKMGVAKALDVDESRIDIQFAGLNHMVFGLDVFLDGVSVKDKVIEAMADPENAMTMKNISGESWEPDFIRGLGLIPCGYHRYYYKTQEMLEHELEASKTEGTRAEVVQQVEKELFELYKDPELAIKPPQLEKRGGAYYSDAACNLISSIYNDKHDIQPVNTMNNGAIASIPDDSAVEVNCVMTKNGPKPIAVGDLPVTVRGLVQQIKSFERVAAEAAVTGDYNTALVAMTINPLVPSDKIAKQILDEMLEAHKEHLPQFFRSVEA

SEQ ID NO: 9456 - protein, 109 aa, Bacillus licheniformis
MSEELERTIFQIILHGGNGRSFCMEAIAEAKKGDFAAAKEKIRAADEELIRAHHFQTALIQNEAKGAKTEPSLLMIHAQDHLMNAMTMKDLAAEIVELYEKMNIHGGVN

SEQ ID NO: 9457 - protein, 450 aa, Bacillus licheniformis
VNKFNAFLEEKIMPVAGRIAAQRHLQALRDGIILTMPLIIIGSLFLILANLPIPGYPEFMAGIFGDQWAEKLSYPVNVSFDIMALIATFGIAYRLAEKYDIDALSSGAIAVAAFLLATPYQIPFTPEGATEEILVSGGIPISLMGSKGLFVGMLIAMFSTEVYRWVVQKDIVVKMPDGVPPAVSKSFIALIPGFAVIGSIWAARLLIEMTPFESLHNVVNVLLGTPLSVLGGSLGGSLIAETVKMLLWSCGLHGANIVGGVMSPIWYGAMDENRLAFQAGEALPNIFTTQFFEIWINIGGSGATLALVITMFLRARSKQMKQLGRLAIGPAVFNINEPIIFGMPIVMNPMLLIPFIVSPLLMITATYIGMSTGLVAKPAGIAVPWTMPPGFSGYLATGGKISGAVMQLINLLISFVVYYPFFRMWDKQKLKEESELETGTAASDGQQVSV

SEQ ID NO: 9458 - protein, 101 aa, Bacillus licheniformis
MNILLACAAGMSTSLLVTKMEKSAEEQGKDYKIWAVSGGEVQNHIDKADVLLLGPQVRYMLPQLKKLGESKGVPVDVINTVHYGTCNGAEVLKSAEQLAGS

SEQ ID NO: 9459 - protein, 649 aa, Bacillus licheniformis
MLNARLKLILGELIGAESPLTSAYLANELNVTSRTIRSDVKELDRLLSKNGAAVQSIRGAGYRLSIKNDRLFRQLLQHTFHQELSTPVFPNERILYLLKRLLLTEEYVKLEDLAAEMYISKSTVQNDMRDVKKRLKPYDIELKIKPNYGFKLKGDEMKLRSCIAEHLFPKRETDIDIMNTRISILPKEELAMIRQTILEKISEDQISLSDIGLNNLLIHVAIACKRIRSGKHVSLYSKDVKEIMNHKEYEVARAIVRTLEQKLHVAFPEKETAYIAIHLLGAKRTVMAAIRSGAIESMMDEEETDRLTQLIMKTIDQKFTLGIGDDKELKIGLGLHLKPALNRCRYGMNIRNPMLDAIKANYPLAFEAGIQAGEVIKRETGFDIQESEVGYLALHIGAAMERRNMNRPSKRCMIVCASGAGSAMLLQDRLRATFGSKLEILGTVDYYKLNQMSLHALDFVISTIPLSDDLPIPVIQVNTILGGGDLTKIEQVLAEDDGIASTYTRKELVFLRESLSSREDVLRFLCGKVTQSGLADAGLEASVFEREAVAPTCFGNLVAIPHPMTPKTASTFWAVCTLQKPIVWENKRVQFVCLLCVEKDNTANLQEMYKFLGRVLDDRAIVRELLKCKTYGEFMSVFKKSGPAHRYAK

SEQ ID NO: 9460 - protein, 35 aa, Bacillus licheniformis
MKKMIKSAVKWAPVIYPIAWKIIKNRREKKNLKAG

SEQ ID NO: 9461 - protein, 196 aa, Bacillus licheniformis
MNPAHEPLPLEFYNKPTIELARSLLGCLLVKETEEGPASGYIVETEAYKGPGDRAAHSYGNRRTKRTEIMYREAGVVYTYTMHTHTLINVVSGGADEPEAVLIRALEPHEGLALMEKRRSGKKPRDWTNGPGKLTKALSITMNDYGRPLTGPPLYIAKGYEPQDILSGPRIGIDNSGEAREYPWRFWIKGNRYVSR

SEQ ID NO: 9462 - protein, 223 aa, Bacillus licheniformis
MHSSNPVKRQSASDYAYNELRTKIIELEYPPSEQLAEDSLAKGLNISRTPLRQALYRLELEGLVSKQPNGRLRVCPISLAEAKEVFKVREALEGLLTAEAAQLVTPESLHQLEDRIELMKLAAVKGRKTDTVKYGSEFHSILHAISTNATAKRFLDQLESRIERYRRISGYKNPDYKPSVSFNEHLDIFNAVKEKNSVLAEAAMRSHIKRSLRSIEETLERSY

SEQ ID NO: 9463 - protein, 371 aa, Bacillus licheniformis
MGKQGVFKPGLEGVIAGETNISFLDTEAEQIVIKGYDLIELAEQKTYLDLVYLLLQDKLPDPMELKGIESALKSAYELPGGIYTILKSLPNNTHPMDALRTGISALAGYDPELNDRSQAANRSKALRLIAQVPNITANSYRILHQKNVITPDKQLSFSQNFLYMLTEKEPTPQETAVFDQTLMLYSEHEMPNSTFAARVIASTNTDIYGAFTGAAASLKGHLHGGANEAVMYMLLEGETKSGFCKLIEHKLSRKEKIMGFGHRVYMRKMDPRAALLKKALYSLSHKTGRQDLYEMCDAGEKLMREEKGLYPNLDYYAAPVYYLLGIPIDLYTPIFFAARSVGLSAHVIEQHEDNRLFRPRVHYTGPRHLHP

SEQ ID NO: 9464 - protein, 479 aa, Bacillus licheniformis
MKTESQTLQNCDQLLEEIADYTVNAKISSEEAIETARYVLMDTLGCGILALKYPECAKHLGPIAPGTVVPNGTRVPGTQFELDPVHGAFNIGCMIRWLDYNDTWLAAEWGHPSDNLGAILACADYVSRQLLAAGKEPLTINDVLTAIVKAHEIQGVLALDNSLNRNGLDHVLFVKVASTAVACSLLGGTKQDVINAVSQAWVDNSSLRTYRHAPNTGSRKSWAAGDATSRGVRLAMMTLKGEMGYKTALSAPMWGFQDVLFGGKELTLARPLDSYVIENVLFKISYPAEFHAQTAAEAAIRLHPEVKDRLDDIGQIVITTHESAIRIIDKTGELHNPADRDHCLQYITAIGLIYGDITADHYEDETAQNPEIDRLREKMTTVENKQYSVDYLDPEKRSIANAVQVFYKDGTHSEKIAVEYPIGHRRRRNEGIPLLKDKFINNLKTRFPAGQAERINALLNDPHRLSGAPVPDFMELFVI

SEQ ID NO: 9465 - protein, 305 aa, Bacillus licheniformis
MWIVSKQSTQEELANAFRKLMKAPDILKIPGVHDGMAAITAKNIGFKALYLSGAAYTASRGLPDLGMIHSQEIAEKASELVRAANLPLLVDIDTGYGGVLNAARTAAEMAESRVAAVQIEDQQLPKKCGHLNGKTLVPAEDMIAKIRAIKETAPSLVVVARTDAKAAEGMEAAVRRANLYADAGADAIFPEALTSAAEFREMASSIKAPLLANMTEFGKTPYYTADEFQMLGCSMIIYPVTSLRAAAKAYERVFAEIFEKGTQKGVLDDMQTREELYDAIHYYDYEKLDENIAKTVLPEIGKEHR

SEQ ID NO: 9466 - protein, 397 aa, Bacillus licheniformis
MTKHKADRSLKSLLEILFVSTRLGLTSFGGPIAHLGYFHAEYVRKRKWMDEKNYADLVALCQFLPGPASSQVGIGIGVMRAGVLGGISAFIGFTLPSVIALVLFAMVLQGFDIGTAGWIHGLKIVAVAVVAHAVMGMAQKLTPDKRRKAIALFALVATLLWQTAFTQVGVILLAAFAGYLIYKEQVETDDSVMQFPVSRRFAAVCLSLFFGLLILLPVLREMTSSGWIAMFDSFYRSGSLVFGGGHVVLPLLEREFVPAGWLSEEAFLAGYGAAQAVPGPLFTFAAYLGAVISGWQGGLLATAAIFLPAFLLILGTLPFWDTLRRNPKVKGALMGVNAAVVGILISAFYHPIWTSSVLAPIDFAFAAVLFSLLVYWKLSPWIIVAAGAVGGAMLQLL

SEQ ID NO: 9467 - protein, 102 aa, Bacillus licheniformis
LEDKVLRKLFLGFIQIHILHHASEHPIFGLWMLEELKEHGYNISAGTLYPILHSMEADGLLRKEEQNVDGKIRKYYSTTEKGASVLKEARLKAYELFKEIKE

SEQ ID NO: 9468 - protein, 571 aa, Bacillus licheniformis
MIRRFFSYYKPHKRLFFIDFSSAIVVAVLELAFPLVVQWFIDTLIPGGDWLEIVWVSIGLLLIYLLSTGLQYIVNYLGHKLGINIETDMRQELFQHVQRQSFRYFDNTKTGHIISRITNDLFDIGELAHHGPEDLFIAVMTFLGAFWIMLTINVKLALVAVLFVPLLIILIIYSNIRMNRAWRQMYSEIADVNARVEDSVSGVRVVQSFTNERFEISRFLKNNQKFRKAKLKGYKTMALTTAGTFLMTRLMILAVLVFGAWLSFSGNMSYGEFVGFVLYVNVLFKPIDKISAILELYPKGMAGFKRFTELIDTKPQIVDRKDAIDVPALEGNIVFKNVTFGYEKHKPVLRGIDLSIKAGETVAFVGPSGAGKTTISSLIPRFYDIDGGAITIDGIDIRDMTKRSLRSQIGIVQQDVFLFTGTLRENIAYGKLDATDEEIQRAAKMAHLEQLIESLPDGYETQVGERGLKLSGGQKQRIAIARMFLKNPPILILDEATSALDTETEQVIQNALTELAKDRTTLVIAHRLATIRNADRIVVVTENGIAEEGTHDELVERGGIFANLHRVQYQS

SEQ ID NO: 9469 - protein, 219 aa, Bacillus licheniformis
MRDIQLFLAGDSTVCDYDENRAPRAGWGQKIGEFLSAGVLIRNEAASGRSSKSFIEEGRLKRIITQIKSGDYLFVQFGHNDQKPDDRYTEPYTTYKQHLTRYIDEARLKKANPVLITPVQRRSFASDGRFKNTHGDYPDAMIQLAEELRVPLIDLAFKSRQLLESLGPEASKKLYLWLEPGEHPNYPDGARDDTHFCDFGAKEIAKLVAQEAKEAGIPL

SEQ ID NO: 9470 - protein, 160 aa, Bacillus licheniformis
VKTNHFRGPIFCPPPFKPAPKPQPPQKPQPDNPQPDNPTQKPVLEAKTINSNKEWSTSDIEITYRPNAFVGSSYVEFHFPYRFHASTRDTLNGKTLDYTQILNDGQTVRVPVYALSSSEFKLVMVRKTLPNAGTHRITAELQQNGKNINHAETTLEIVPR

SEQ ID NO: 9471 - protein, 157 aa, Bacillus licheniformis
MLKRKFIGKIGVGLLTSAALFSFILPTEEASATFYRNAPTLHVETVDSNKEWTTSDIEVTYKPNFFVGSSYVEFNFPYRFHANTRDSLNGRTLNYTQILNDGQTVRVPVYAFSSSEFKLVMVRKTLPNAGTHRITAELQKFGRNYNHAEATVDILPR

SEQ ID NO: 9472 - protein, 409 aa, Bacillus licheniformis
MGTLNSQADLAAHSKAKPNRVWIAVILGILSGIGPVVIDLYLPGLPQMATDLHTNASVVQLSLTSCLLGLAIGQIVIGPFSDVLGRRLPLIVSLSVFAAASFLCAMTSSVWVLIAMRFIQGAAGAGGIVISRAIARDLYSGTELTKFFSLLMLVNGIAPIISPVAGGQLMKWTTWNGVFFIIGLFGLLMILSVIFGVKESLSPENRTAGGFKETFVSFGRLFGQRTFMGYALAQGLIVAGMFGYISASPFVLQDIYKLSAQAFSFCFALNGLGIIIAAQITGRLAGRFGEASLLRSGLLLSFTASVVLFVSVFFKAPLILILIPLFVVVSCIGIVTTTSGSLAMQSQGKSAGSASALLGLLPFILGAAAAPLVGIAGSHTALPMAVVILFCNISALACFNILVRRAALK

SEQ ID NO: 9473 - protein, 258 aa, Bacillus licheniformis
MNSFFMLFQKEWTESWRDGKLLWLPVILILLGLIQPLSLYYMPQIIDMAGNLPEGSVIDIPRPRGEEVMASTLSQFGTVGTAIFVFSVMGSIVHERNQGSLSLVMARPVSPLQYIGSKWLQQVLLVLVSFAASYGLAFYYTNLLFGKVEFDRFLVSLSVYSIWIIFVMSVTMFFSALFRHIGGIAGMSICFIAFVSLAGSLFPRFTEWMPDKAKSQADYFIMHGSWDHAFGWMVFSSLGIVILLFMCTVFVFKRYESY

SEQ ID NO: 9474 - protein, 295 aa, Bacillus licheniformis
MLSVNGLTKMYQQHQAVQNVSFDLEYQQCVALLGPNGAGKTTTLQMLSGLLAPTSGRIRFLGRESINRLEIGYLPQHPAFFSWMTALEYTVFAARLSKMKRREALEKSRTALRYVGLEKEEDRKIGGFSGGMKQRLGLAQALVHEPRLLILDEPVSALDPAGRREVLDMMKDLKKKMTILFSTHVLHDAEEVCDQVIMLKEGAVKWSGPLHRLKNRHLKPSYMLTAEESLEGWLEHLPYVSKVVYHKPSQAEFYLTDRSDNRRLLAECLNRQVSIVRFEQKTMSLEDMYLKVMGL

SEQ ID NO: 9475 - protein, 61 aa, Bacillus licheniformis
MTGADIPWALLAPFHCAVFHFSSVRIGQLHKTGENEWPKVDVDFDHFRDQFCRSRLLLYHR

SEQ ID NO: 9476 - protein, 72 aa, Bacillus licheniformis
MNLDMTQEKLLLLLCISPLLFAQSIFLFLNAKKKGANAWFWGIWGLIQTPMPLLFYYLFVVRPFHKKRRPLS

SEQ ID NO: 9477 - protein, 107 aa, Bacillus licheniformis
VNERDEKETVTHLKRELERIDDNFVPPVPQAFELNQRLARFKQERKRALKKELLCFIVMALVILSAYLTISVQVPAVFIMVQGAALILLPALALIEKRRHTADEEAD

SEQ ID NO: 9478 - protein, 177 aa, Bacillus licheniformis
VDQADEKELIIRAKDGEDAAFTKLFQLHYPFVYQYVLKLTLNPDLTEDLVQETMLKAYVSLHQFQGNAKFSTWLISIASRLFIDHQRRKKRENRKTQAAGEEALRKMKWNPALHGHEWSEYLELFAALEPEFRMPILLRHYYGFTYPEVANMLKIKEGTVKSRVHHGLKKIRKEWGQ

SEQ ID NO: 9479 - protein, 417 aa, Bacillus licheniformis
MERQKQIVYEEKQILRKDHMIFWGAVFCFWFATYIYVPVFGLYLDNIGFSYSAIGIVLGSYGVTQILLRFPFGILSDVLSPLRKQLLISGFAMSLLSCCIFLLSDSFIMVITARLLAGMTAAMWVMATVLYSQYFTKDQSSKAMGILQFLTVLPQFISMAVSGYLVHLFGWMFPFWIGVAVSCIGLILSFYIKDNGPRHTAKGMALSDYVKQTLRLPDLKAITTLSFLAHAVLFMTVFGFTPIYAESVGIDEKQLIWVMFAFFVPQTLASVWCIFYKVKAADALIWISYVITAVFFCLLPFAETLFAVCIVHAVTGLTLGFIFPLLVSKVVQLGTPQLKMSVMGFYQSFYALGFFLGPVVAGKVAELFGLPEVFWFAGALSLAAACIMLFSKQFRIFTAGRRDKSSNIVQPTKVFRK

SEQ ID NO: 9480 - protein, 43 aa, Bacillus licheniformis
MPRDRRKKKGTLKTRIKEENSDEPLVGFIAVSLTEDLRRLNDI

SEQ ID NO: 9481 - protein, 532 aa, Bacillus licheniformis
MDQHSNEQKSDMETDDTLTNRQGHPITNNQNIRTVGNRGPSTLENYDFLEKISHFDRERVPERVVHARGAGAHGYFEAYGTAGDEPVSKYTRAKLFQEKGKRTPVFVRFSTVTHGISSPETLRDPRGFAVKFYTEDGNWDLVGNNLKIFFIRDAVKFPDLIHAFKPDPVTNLQDGERIFDFISNTPEAMHMITFLFSPWGIPANYRQMQGSGVNTYKWVNQEGEAVLVKYHWEPKQGIKNLTQKEAEEIQAKNFNHATQDLYEAIERGDYPEWELFVQIMSDDEHPELDFDPLDDTKLWPEDQFPWLPVGKMVLNKNPEDYFTEVEQAAFGTGVLVDGLDFSDDKMLQGRTFSYSDTQRYRVGANYLQLPINAPKKRVATNQRGGQMQYKVDLGKNQSPHINYEPSTINGLKEAKQDGKEYTPHVEGNLVRESIDRQNNFQQAGDTYRHFEDWEKDELITNLVNTLAPCDQRIQTKMIDMLKQCDKEYGSRVEEGLKNASSQNTSSREPIGAEGAEDAPRQAEEKGHSQDPY

SEQ ID NO: 9482 - protein, 50 aa, Bacillus licheniformis
LFLFVVIKGSPRVNFNYKTMITFLKKKTIFIYNYYKEKFIIVDLIMINAE

SEQ ID NO: 9483 - protein, 485 aa, Bacillus licheniformis
MTTNKNNLTTSWGAPVGDNQNSMTAGSRGPTLIQDVHLLEKLAHFNRERVPERVVHAKGAGAHGYFEVTNDVSKYTKAKFLSEVGKRTPLFVRFSTVAGENGSADSVRDPRGFAVKFYTEEGNYDLVGNNTPVFFIRDAIKFPDFIHTQKRHPVTHLKNPDAVWDFWSLSPESLHQVTILMSDRGIPATYRHMHGFGSHTFKWVNAEGEGVWIKYHFKTEQGIKNLTEEVGTKIAGENPDYHTQDLYEAIEKGDFPAWKLYVQIMPLEDADTYRFDPFDVTKVWSQKDYPLIEVGRMVLNRNPENYFAEVEQATFSPGTLVPGIEPSPDKMLQGRLFAYADAHRYRVGANHNSLPINRPKAEVHNYQRDGQMRFDSNGGGSVYYEPNSFGGPQESPENKTTAYPVSGSADSTAYDHNDHYTQAGDLYRLLSEEERTRLVSNIVGSMKQVTKDEIKLRQIQHFYKADPEYGTRVAEGLGLSVPQEV

SEQ ID NO: 9484 - protein, 138 aa, Bacillus licheniformis
VEDEQLVPLLKKRGLRITAQRVLILKTIASLGGHPSAEDIHRELPYMSLPTIYSNLKLFVKLGILKELSHGDAKSKYELFTSQHYHVICKSCGKIADLDYPHLKEVEHAAAQLTNFKVNSHFLGIYGICTTCQEQQQR

SEQ ID NO: 9485 - protein, 317 aa, Bacillus licheniformis
MERKKVGLLVMAYGTPYQEEDIIPYYTHIRHGKRPSDDMIEDLKKRYKHIGGISPLAKITLAQAKELEKTLNERQDKVEYVMYLGLKHISPFIEDAVEQMKKDQIEEAVSVVLAPHYSTFSTEVYNRRAKQAAAAIGGPRIASIDEWYQEEGFIRYWSEEIGSILNDMSEKEREKAAVIFSAHSLPEKIREHDDPYPDQLEKTAQLIGERLSFDQIAVGWQSEGNTPDPWLGPDVQDLTKELYEEGFRSFIYAPVGFVSDHLEVLYDNDYECKVVTDELGASYHRPPMPNTDPRFIDTLASVVERTYNSTEQEKAEL

SEQ ID NO: 9486 - protein, 313 aa, Bacillus licheniformis
MRVLKNELYRLMVTKSTWIVLSLLLVMTIAVAWMVSNGEKEKETGNWKEQLTVQNAQYEREMRELSPAVPKYQFLKEEIAVNQYRLEHNLPPSAKYNVWTMLKELKPITTLIALIAIVLAANSIALEHSKGTIKFAIATPVKRWHYLLGKYLSILLNTVFMFAATLLFAFVLGYALLGLEGSQYYLSYRSGEVIKMSMLKFLALDYGAALLNIIVLATLAFMISVILRSAVVSVGLSLFVFFTGSAITQFLAAKFDWTKYTIFANSDLSQYIDGEPFIQDMTLSFSAAVIAVYFILFLAVSFWVFQKRDIVTS

SEQ ID NO: 9487 - protein, 300 aa, Bacillus licheniformis
MSQVEFEGVSKRIKGRPIVQNITFQIAPGTIFGLLGPNGAGKTTLIKMIVGMAKPTSGDIRIDGYSVKSNYEEAAARVGSVVENPSFYEHLTGYQNLKYLGGFHSHVSKERIEEIVQLVDLTGSIHKPVKTYSLGMKQRLGLAVALLHDPEFLILDEPTNGLDPQGIIDLREHLQYLAKTFNKTILISSHLLSEVEMICDEYGVMKNGELLQIKSNHRDTDTVRYRLTLNGHADEAADLLNEYQYAGGLTEDKNEIYVLCMEEDIMKVVNLLMENKIRVLHMKQEKQSIEQSFLELINKG

SEQ ID NO: 9488 - protein, 249 aa, Bacillus licheniformis
VKNLLKAEWIKLRNSDFTMTSIFILTASLVFTGFMAKRITPFAGGNEWTSLRHLTLLLVFSTIYPWLVSSVTVFLHKDELKNRVWLNRILSPQPFAAMLFAKVLFIGLFAAALYAVCVIESLAFGLISGFPGPAPWFSWMLGFILNLLSTFPLICTVLWLKFTSKEKTSLNIIVFICSLLSFGVSQSPLGLLFPWSFPVTALIAMEKSVAVLIGSIVWFTAVSLLFFSLLLKQIRPYQKGGIQNESSRI

SEQ ID NO: 9489 - protein, 237 aa, Bacillus licheniformis
MKLFKVYFWLSCPEAVKKRMKFQTFACTVMIITVLAVLLNYLLFYKNGANKEIRSMEGMTVYVVSVWLTYITGRRLFGRMMHQAFILRYPVRLFTWVLTGIAVITIVSALVLLYGCLAVSLLFQKDVLFSPERLAAVAILAVIMSSVQFFLKTLKAEYLFVLLMTLTPFFMQSGTLYLPWGVSWLLLTEYSVNDIGLAVYLISAGYIAVCMCWILRSGEEKIREKFAQSGMDQTQEL

SEQ ID NO: 9490 - protein, 211 aa, Bacillus licheniformis
MVELPIVMKHVEVRAGDRKLLENVSLAVDKGSRVLLKGENGSGKSTFLKAITGLSLFAGEILIYGQSIIQNREAAVGHIGYVSDEVPLHEHLTGTDNLRVHALLHGIDDDDRIYSELERFGINPADDTKVQYYSTGMRQKLKIAMALFHQPSILILDEPLNGLDRKAQESVVDIIRRYDGTIMASSHWNETFIELFDRFLAIESGRLNEIV

SEQ ID NO: 9491 - protein, 95 aa, Bacillus licheniformis
MLEMINSIGAVAGFAGFIGIIILISLDGKDERGAYIQNKFFRVMFFLLTLGISAVIFTSSWVDLSFANYKNMVTLAFSLPYFIGFFILLGIRSRV

SEQ ID NO: 9492 - protein, 92 aa, Bacillus licheniformis
LYSIYVNDLQIKRVIEIEKQSGVLTNRIPVLRAEKGWTQKQLADLLGVTRQTVISIEKNKYKPSLLMGFRIAALFEKDINEVFQYQLEEDDR

SEQ ID NO: 9493 - protein, 62 aa, Bacillus licheniformis
MYEYQTVSIAVGAFNGKLEKNYSDVIHEYAEKGWKLHSVFSVPSRAGGQVSSIELIFEKPKS

SEQ ID NO: 9494 - protein, 443 aa, Bacillus licheniformis
VKRIYIFLLCFAVLLPVGGKTAQAKEQAGEQYLLLEHVKDKSKLLDTAEQFHIHADVIEEIGLAKVTGEKQKLAPFTKKLAEKVGADVIEKPIANTAVNETESVISGSPAWGLDGILELKEYLWFAAKQTDSYRTYQIERGHPDVKVALIDSGLDLDHPDLKASVNTNGGWNYIDGKPVSGDPTGHGTQTAGMINIIAPDVTITPYQVLDEKGGDSYNIMKAMVDAVNDGHEVINISTGSYTSLDREGKVLMKAYQRAANYAAKHQVLVFSSAGNKGVNLDEMRKTENKVHLPSALKHVVSVSSNMKSNNISPYSNQGREIEFTAPGGYLGETYDQDGMVRVTDLVLTTYPKGKDNTALDQMLNIPKGYSLSYGTSLAAPQVAGTAALVISEYRERHHRKPSAKQVHHILRKSALDLGKPGKDVIYGYGEVRAYQALKMMNKE

SEQ ID NO: 9495 - protein, 718 aa, Bacillus licheniformis
LFFHKTPFIEQMQQTECGLCCMAMVAGRYGSHHTLHELRDLSGCGRDGMTLFHMRQLSENLGFDAKVYRAGAAELPHVRLPAIAFWSDNHYVVIDQIKDRHVNIIDPAIGRKKLSIEAFLENYSGIVLEMIPTERIRPKKKPPVWRHFLFHLKESPSLLATVLLFAMIFQLVSLGIPMLVQYLIDDILAQNQQALLQTFMTGVLVLMLVQGTVQLIRGQFIIKLNNFLDKRMMRTFFSHILKLPYQFFQLRSFGDLLFRATSLRIVRDMMSSQLVLGVLDFGALLFISFYMFYKSPPLAGLVILLALLNVGITALSRGKLREKNQDEIAKTSQIQSYQTEFLYGIFGIKTVGIEKETYQKWDHYLGELIGAYRRKEGFLNIVNSLTGTMQIISPMLILWIGAMLVFEGNLSVGELVAFHALSTQFFNTSSSIVQTVNSVILTTSYLHRIQDILQSPIEETPGNKDNSPIKGEIRLERVSFRYSPHSEEVIKDVSLHIKPGEKIAIVGQSGSGKSTLAKLILGLYMPTKGSVFYDGVNIKNKDLSALRKQIGVVPQDVTLFNRSIKDNISLYSEDVDIERIHEVAKMAQIYDDIQNMPMGFNTMISEMGMNISGGQRQRIALARALLNRPAVMLLDEATSSLDHQNEKKIDAFLRELKCTRIVIAHKLTSIMDADKIIVLEDGMVLNVGTHETLLNESKFYGDFYRKFLEKEQSAEVMM

SEQ ID NO: 9496 - protein, 1026 aa, Bacillus licheniformis
MSMKEFEIYLYKALYSNERGGQGQEHPSGFFPENGKTPSRPTDFHLSSVQHSPNEPVQLQGKMPEWAACLSEIMKYNPKAVSELKHPLPHMSFVTFFVPFLLFAQERMSKAFSEFEKQEGGLSGIIDAAGYQDGIMSELHQCLDKLATRTLITELNVAREDGRLKGASPEERYVYFVEQYISDPEIYREFFELYPVLGRLMAEKVLRVLEIHEEIIGRFLSDRSLIAKKFNIASPELIGFEGDLGDSHKNGQSVKVLVLNNGKLVYKPRSLSIDEHYRELLNWLNGRGMKYSLRAAEVLDRGNYGWQEFVKHEGCSSEEELERFYFRQGGHLAILYGLRSVDFHNENIIASGEHPILIDLETLFDNHVSIFAQNQNLHVTALELKHSVLSSMMLPVKFKHDEVLDFDLSGIGGKGGQQSKKAKGYAVLNYGEDRMSLKETSLTTEEKLNAPKLNGRPVSAVSYTDFIVEGFKNAYAIMMKHKEELAGPSGFLNLFKHDEVRHVFRPTHVYGKFLEASTHPDYLTAGDKREQLFDYMWMLAKQSEKANVFIPDEIVDLLLHDIPYFTFYAGGTSLLNSRGEESEGFYETSSIDLAKKKIQSFSEKDLNHQLRYISLSMATLIENVWDHAESGLGQKETVADLGKEVKHIADDLLQKAIYSERGEGPFWISNNAGDEKMVFLSPLPMGLYDGMAGLAIFFAQAGKVLNEQVYTDTARSMIEEIQKEESYWVQNGNSHSAFFGTGSFIYLYSYLGSLWEDDSLLERALNLIPRVLEQPNQTQNPDFIAGDSGLLTVLVNLYEIKQHPAVLDSIRQVLSRLNDRIGRLLDSIEQDAVSLTGFSHGLTGIAFSIAKAAKVIHDDSCKELVLKLVEEEDRYFQKDHLNWLDLRNDSHTLSPSYWCHGAPGILLGRAHIQAFIPELTTRTLKLQEALQSSLNLADCQNHSLCHGLIGNLNILLDIKRLNRELHVPDDIFYIYKTKNRGWKTGLHSDVESLGMFVGTAGIAYGLLRLLDESVPSVLTLDIPTGR

SEQ ID NO: 9497 - protein, 72 aa, Bacillus licheniformis
MKTMKNSAAREAFKGANHPAGMVSEEELKALVGGNDVNPETTPATTSSWTCITAGVTVSASLCPTTKCTSRC

SEQ ID NO: 9498 - protein, 74 aa, Bacillus licheniformis
MSKKEMILSWKNPMYRTESSYHPAGNILKELQEEEQHSIAGGTITLSTCAILSKPLGNNGYLCTVTKECMPSCN

SEQ ID NO: 9499 - protein, 1052 aa, Bacillus licheniformis
MNEKSAGYHERLPVAQTQSPLVNDKIKYWRSLFGDDDKWLNKAVSLLSHDPLSSIAQSSVSQSVGLKDSRRGPWQKMQKRIFETPFSYKDSALQDSELLFDSLLTRFASAAQDALEEQNIILSPPLCRQVLTHLKQTLLQIALQTLILELNILRLEDQLKGDTPEMRYLDFNDNFLVNPGYLRTLFNEYPVLLRLLCTKTDYWVQNFSELWKRLRQDREQLQAAFHIAGDPVHIELGVGDSHNKGKMAAILTYSDGKKIVYKPRSHDVDDAFQLLLSWINDRNSGSPLKTLRLINKKRYGWSEFIPHETCHTKKELEGYYTRLGKLLAVLYSIDAVDFHHENIIASGEHPVLIDLESIFHQYKKRDEPGSTAVDKANYILSRSVRSTGILPFNLYFGRKNRDKVVDISGMGGQEAQESPFQALQIKGFFRDDIRLEHDRFEIGEAKNLPTLDHQHVPVADYLHCIIEGFSAVYRLISDHGESYLATIEHFKNCTVRNILKPTAHYASLLNKSYHPDFLRDAVDREVFLCRVEKFEDADTDIAAAKTELKELIRGDIPYFLSKPSDTYLLNGEEEPIAAYFETPSFTRVIKKISSFSDQDLKEQANVIRMSILAAYNARHEKDAIDIDQNHPSPRSGALQPLAIAEKAADDLAEKRIEGNDGKDVTWISTVIEGVEEISWTISPVSLDLYNGNAGIGFFMSYLSRFAKRPETYSHITEQCVFAIQRALNELKEKEEFLKYADSGAFTGVSGYLYFLQHAGTVQKKNEWIELIHEALPVLEAVIEQDENCDIISGSAGALMVLMSLYEQLDDPVFLKLAEKCAGHLLQHKTNIENGAAWKDPHTQNYYTGFAHGTSGIAAALSRFNKVFDSQSLKKIISQCLAFEKQLYIASEKNWGSKGREQLSVAWCHGAAGILLSRSILRENGVNDPGLHTDILNALETTVKHGLGNNRSFCHGDFGQLEILRGFREEFSELNTIIQNTEDRLLTYFQENPFSKGVSRGVDSAGLMLGLSGVGYGMLQCQYGEELPELLQLSPPQALIKKNSKAFKRENVF

SEQ ID NO: 9500 - protein, 341 aa, Bacillus licheniformis
MKKLISIIFIFVLGVVGSLTAAVSAEAASALNSGKVNPLADFSLKGFAALNGGTTGGEGGQTVTVTTGDQLIAALKNKNANTPLKIYVNGTITTSNTSASKIDVKDVSNVSIVGSGTKGELKGIGIKIWRANNIIIRNLKIHEVASGDKDAIGIEGPSKNIWVDHNELYHSLNVDKDYYDGLFDVKRDAEYITFSWNYVHDGWKSMLMGSSDSDNYNRTITFHHNWFENLNSRVPSFRFGEGHIYNNYFNKIIDSGINSRMGARIRIENNLFENAKDPIVSWYSSSPGYWHVSNNKFVNSRGSMPTTSTTTYNPPYSYSLDNVDNVKSIVKQNAGVGKINP

SEQ ID NO: 9501 - protein, 283 aa, Bacillus licheniformis
MSAEQLPIWTKDCVKGSLPKRGNDSHKGTYGTGLLLAGSDDMPGAALLAGIGAMRSGLGKLVIGTCGSAIPLILPVLPEATYWRDGAEKAASGEIAEPYRAIAIGPGLPPSQMTEQAVQSVLAKDCPVVLDAGALSKRSYQERKAPVVLTPHPGEFSKMTGLSIREIEANRAGYARDYAEEQGITLVLKGNETIVAFPDGECWRNVTGNGALAKGGTGDTLTGMLLGMLCCHENSREAVLNAVHLHGACADAWTKTRSAHALLAHELSDLLPTVWKAYEDGNK

SEQ ID NO: 9502 - protein, 582 aa, Bacillus licheniformis
MNNEDGWILPYIKKNTRLLIIVVLLGGLTACSAAALMFTSGYLISKAATRPENVLMIYVPIVAVRTFGILRSVSRYVERLTGHHIILKILSDMRVRLYRMLEPQALKWRERFRTGDMLGILADDVEHLQDMYLRTVFPGLSALLLYGVFIAAIGFFSWPFAGLMAVYAAVFVFLVPLVSLLVTRAKNVALKRGRSHLYRQLTDAVMGVSDWVFSGRQNDFVHSYEAAEHEWLAIEKKQVRFSRWRDFAMQCLAAGLVLLMLIWAGGQSAEGALAPVFIAAFVLVVFPLTEAFFPLSDAATSIPEYQDSLERMDGLQPPKRGNGADVQQERAEAVGLDDVTLRFEDVSFSYEQGQPVLDGVSFILKQGEKTALLGPSGAGKSTILSLIQGALAPSKGNITLNDISVQSLQGEISRVVSVFNQQPHLFDTTVLNNIRLGNPDASDEDVYWAARQVKLHDYIQSLPDGYHTSVQETGIRFSGGERQRIALARILLQDAPTVVLDEPTVGLDPKTEKELLSTMFQVLDGKTVLWITHHLAGAEAADRILFLDKGKLAMAGSHQQLLENNPRYSRLYRLDAPVSRLF

SEQ ID NO: 9503 - protein, 569 aa, Bacillus licheniformis
LQYKGMKRILAVLTVLTCMQGAAIIMQAEWLAEAVTRLFNGERVGSLFPLLILFTAAFLFRHAVTLVRQKLIFDYAAETGAGMRKKFLEKLFQSGPRLARKEGTGHVVTLAMEGIAQFRRYLELFLPKMVSMAVIPPAVVCYVFFKDTSSAAVLMITMPILITFMILLGYAAKRKADSQWKTYEMLSNHFTDSLRGLETLKVLGISRSHTKNIFHVSERYRKATMSTLKIAFLSSFALDFFTMLSVATVAVFLGLGLVDGSISLEPALAILILAPEFFLPVREVGNDYHATLNGREAGKAIKAILDSPGFKDEAPLSLERWSDDDQIEFKHVDVRHEDEENCSLSGISLSFKGKRKIGIIGESGAGKSTLIDVLGGFLETKSGVIKVGGKKRTHLQTDSWQNQLLYIPQHPYIFPDTLAANIRFYHPAASDEDVEQAARAAGLSELIDQLPNGLKERIGEGGRALSGGQAQRTAVARAFLGNRPIILLDEPTAHLDIETEYELKKTMLKLFEDKLVFLATHRLHWMLDMDEIIVLKDGQVAETGTHQELIEKRGVYYELVKAQSFGGAS

SEQ ID NO: 9504 - protein, 338 aa, Bacillus licheniformis
MVSLNEFWFILVAVLFIGFFFLEGFDFGVGMAMRFLGRNDLERRVMINTIGPFWDANEVWLLTGGGAIFAAFPNWYATMFSGYYIPFVFVLLALIGRGVAFEFRGKVETAKWKNTWDWVVFFGSILPPFLFGVLFASILRGMPIDADMNLHAGFTDYVNVYSVTGGVAVTLLCLLHGLIFITLRTEADLRDRARQLAKKVVFAVLAALVAFVALSIFETDLFTGRGHVTIPLAALIVVCYVLSIVFMKQKRDGWTFAMTGAGIALTVATIFTALFPRVMISSVKSAYDLTVYNASSGDYSLKVMTIVALALLPFVLGYQIWSYYVFRKRVSSKEPMIY

SEQ ID NO: 9505 - protein, 468 aa, Bacillus licheniformis
VDELILARFQFASTTIFHFIFVPMSIGLVFMVALMETLYVAKKKDIYRTMAKFWGHLFLINFAVGVVTGILQEFQFGMNWSEYSRFVGDVFGAPLAVEALLAFFMESTFIGLWIFGWDRLPKKIHLLSIWLVSLGTIMSAFWILAANSFMQEPVGFAIKNGRAEMTDFFAIIKNPQLWVEFPHVIFGALATGAFFIAGVSAYKMLKKQELLFFKKSFQIAMIVALVSGGGVAFSGHEQAQHLMKSQPMKMAASEALWDDSGDPAAWTVLANIDTDKQENKSELSIPYALSYLAYKQFSGDVPGMKTLQKQYEEKYGEGNYIPPVKTTFWSFRIMAGSGLLMIVAALTGLYLSFRKRLETSKWFLRTMVALIAFPFIANTAGWIMTEIGRQPWTVFGILTTAQSVSPNVSAGMLLFSVIAFTAIYLVLALVLVYLFVREIKKGAAHHDHHHDDSVSTDPFDQEVYHGIS

SEQ ID NO: 9506 - protein, 60 aa, Bacillus licheniformis
VILRESLSHQKKTVICSETNSGFSFSVSAPYGKFCCFVQSVKSSFRLLRIPFIHLLIYLH

SEQ ID NO: 9507 - protein, 262 aa, Bacillus licheniformis
MESKSLVLVEELALKKQSIFVQSPLRYLLRAMLASMFIGFGVIVAFKTGNLFYVEHSPFTYPIAAITFGGAIILIVYGGGDLFTGNTFYYTLAALRKKMRWPTVIKLWMFSYAGNLMGAVFFAGLIFATGLFKDPSSTGFILSVAEHKMNTPVTELFFKAILCNWLVCLAFFVPMAQKGDGAKMFSMMLFVFTFFISGYEHSIANMATFAVSLVTEHPETISIAGAIHNLIPVTLGNLVGGAFMMGFMYHYANKPGGEEIIK

SEQ ID NO: 9508 - protein, 45 aa, Bacillus licheniformis
LNRDTQIPFDADRTDTVVQCAAPHLKYVQIAGKANENFASLNLHF

SEQ ID NO: 9509 - protein, 109 aa, Bacillus licheniformis
LNHGVCSVSIKRNLRVAIQGRPSRGVGMEEIMFESLDQNGIALNMAEVAILPEEVPLFTKKLVDQGIIISALHNHWIFTEPNILYIHFQSVEPPLTFAKKTAAALSVLR

SEQ ID NO: 9510 - protein, 443 aa, Bacillus licheniformis
MNGNNIIRNLMLEIPSAPGNLGKVTTAIGLAGGDIGEIETIKVGPNYTMRNITVQVEHEEQLTEILEVIRNLKEGIHLHTVSDDVLAAHEGGKIRMKSKMPIRSLADLRRVYTPGVANVCELIKEEPQKANIYTGIGNSVAIVTDGTAILGLGDIGPVAGMPVMEGKAALFDQLADISGVPILLDTNDPDEIVRTVKNIAPGFSGILFEDIGSPHCFEIEERLKNDLNIPVMHDDQHGTAVVTLAAAISAAKSAGVDLKQAHVGQIGLGAAGVAICRMFMAYGVKRVVGTDKSLEAMARLENYGGHAAESIEELMESCDIVVATTGVPGLINKKWVREGQVILALSNPKPEIEPEDALEAGAAYAADGRSVNNVLGFPGIFRGVLNAGADSISHPMLVAAAEAIASCTRQGDLVPHPLNPEVHEIVAKAVERVALSEMGKING

SEQ ID NO: 9511 - protein, 465 aa, Bacillus licheniformis
LKTARLPSMLEIICVLGAFLAIVCSFTVKFELPIQLALFISWFLVILLGLRLGHRYEDLQKSITNGISNGLEAILILIAVGALIGTWIAGGVVPTLIYYGLEFIHPSIFLLATLIICSITSVATGTSWGTVGTAGIAMMAIGEGLGLPLPLVAGAVLSGAYFGDKLSPLSDSTVLASSLSKVEVITHVRAMLYLSIPAYLITAVLFTITGFMYGSRNVDLEKVEFLKASLQNTFDIHIWMLVPAVVVIVLLAMRKPSVPTIAIGALLGAIWAAVFQGMDFADAIGTAYNGFSIDTGIKFMDELLNRGGIEGMLGSVVVIILGLGFGGLLEHLGVLKVIVSKFQQKLTSAGNVTFSTIIVAFLANVFGCAMYVSLILTPKIMEKSYDKLGIDRRVLSRNAEVGGTMTSGMVPWSDNGIYMAGILGVSTFSYVPFMWLSFVSIGLAILYGYTGKFIWYTDKKDSPVQ

SEQ ID NO: 9512 - protein, 475 aa, Bacillus licheniformis
MKAEMTYRTEKDFLGEKKIPADVYYGIQTLRAAENFPITGYKIHEEMIKALAVVKKAAALANMETKRLYKGLGDAIVQAADEILEGKLHDQFIVDPIQGGAGTSMNMNANEVIGNRALELLGHNKGEYIHLSPNTHVNMSQSTNDVFPTAIHISTLKLLEKLLDTMEYMLDAFKKKARDFDHVIKMGRTHLQDAVPIRLGQEFEAYSRVIERDIKRIKQSRQHLYEVNMGATAVGTGLNADPRYIENVVKHLAEISGLPLVGADHLVDATQNTDAYTEVSAALKVCMMNMSKIANDLRLMASGPRAGLAEISLPARQPGSSIMPGKVNPVMAELINQIAFQVIGNDHTICLASEAGQLELNVMEPVLVFNLLQSISIMNNGFRSFTDHCVAGIEANEKRLKAYVEKSAGVITAVNPHLGYEAAARIAREAILTGQSVRDLCLQNDVLTEEELDLILNPYEMTKPGIAGAELLNRD

SEQ ID NO: 9513 - protein, 329 aa, Bacillus licheniformis
MKKLLLLTTGGTIASVEGENGLAPGVKAEELLSYLSDDHSNYTIDCQSLMDIDSTNMQPEHWVMMAEAVYENYSRYDGFVITHGTDTMAYTSAALSYMLQNIDKPVAITGSQVPITFKKTDAKKNIKDAVRFACDGIGGVYVVFDGRVILGTRAIKLRTKSYDAFESINYPYIAFIHDKEIEYNKRVPEVKPGALKLDTSLNTDVCLVKLHPGLKPEFFDCLKGSYKGIVIESYGSGGIPFEKRNILEKVNELIDSGMVVAITTQCLEEGEDMSIYEVGRKVNQDAIIRSRNMNTEAIVPKLMWALGKNGQQAEVKKIMETPIDDDIII

SEQ ID NO: 9514 - protein, 115 aa, Bacillus licheniformis
MNLDRLTTLRKNKKWSLQYTADRLGIAKSTYAGYESGYRRPSLEALIEIADLFNTSTDFLLGRVDDPRDEKAKNEAIELTDWAKLKLAVDGTLLSEEEIKQMVAFIKVKKGLDAE

SEQ ID NO: 9515 - protein, 348 aa, Bacillus licheniformis
MAKYRGYIGTYTKADSVGIYTFELDTEKKALSTPKPAAKLGSPTYLNIAKDNDMLYAVVKDGDKGGVAAYRIDGSTGELTIVNQQTGEGPSPCHVSVDQDNRYVLSANYHNGTILAYPLNESRGLLEPSSKVQHEGSGPHERQEKAHTHYSGFSPDEKYAVAVDLGTDHIITYQLKEGRLEEVKKHAAAPGSGPRHIEFHPQEKYAYVLTELSNEVIVLEYNPDLGEFREIQVISALPEGFDGHSQGGAIHITKDGKFVYASNRGHDSIAVFSVNEYSGELSLVEHVSTEGEWPRDFEIDPSEQFLVASNQETGTLTLFERDRTTGRLTLLESGVPAPEAVCVKFLHQ

SEQ ID NO: 9516 - protein, 229 aa, Bacillus licheniformis
MTKIMIVEDSEDIRKLLRDHLEKYGYETVAATDFTSILEIFLQEKPDLALLDINLPAYDGYYWCRQIRQHSTCPIIFISARSGEMDQVMAIENGGDDYIEKPFSYEVVLAKIKGQIRRAFGEYAVKQGEKVIEFEGVQLFVERFELHCRNEKLELSKKESKLLEVLLERGEKVTSRDRLMEKTWETDTFVDENTLNVYITRIRKKLRSMDVPFSIESVRGEGYQLRTKS

SEQ ID NO: 9517 - protein, 326 aa, Bacillus licheniformis
MKLFLKNHAVLIFLFLFQGGFVFFYYWFAGMQTFTHLFYILGVQLLALALYLSYKWYEEHRVYQWLSSEQKDTEIPFLGTSEFCSELYEKHMELSRLHHRKIHEMESKLEDRVTYMNQWVHQVKTPLSVINLIIQEEDEPVFKQIKKEVQQIEYGLETLLYSSRLDLFEKDFKIEAVSLGELLNSQIQRYKRYFIQHRVYPNKQVPAEDAVIYSDRKWLKFAVGQVITNAVKYSSGRSERIDMTIFRKGERIILEIKDYGVGIPSQDLKRVFEPYYTGENGRRFQESTGIGLYLVKEIEEKLNYDVSIASEVGKGTAVQFSFLTKM

SEQ ID NO: 9518 - protein, 40 aa, Bacillus licheniformis
MAIQAFHKRILAESIPEEPAGMDNIPETVILKKRSKRRIS

SEQ ID NO: 9519 - protein, 258 aa, Bacillus licheniformis
MTTNMLVVKNINKTYKGQVSHQALKDISFNVEESEFTAIMGPSGSGKTTLLNIISTIDRPDSGDILIRGEDPHHLKRAKLAHFRRRQLGFVFQDFNLLDTLTIGENIMLPLTLENQPLSVMEDKLQAIAEKLGIEQLLNKRTFEVSGGQKQRAAIARAVIHQPALILADEPTGNLDSQASKDVMETMQHLNENDNATILMVTHDPFAASYCRRVIFIKDGTLFNEIYRGANRQVFYEEILNVLSMLGGNTNDLSSVRL

SEQ ID NO: 9520 - protein, 21 aa, Bacillus licheniformis
PFFSSLIKTSSGIKEPISPSF

SEQ ID NO: 9521 - protein, 116 aa, Bacillus licheniformis
MKKTISLITAALAVCIGAFLLIHNEVTDRFNPLVKKESVYVQINKDDKHLSPGRYEYTLEGYNDTGKEKEITFSASVSLRRNAYLKVHAKGKYVETWEEVQPGGMPSAVQKKLIKQ

SEQ ID NO: 9522 - protein, 57 aa, Bacillus licheniformis
MIVGIIGFILVVFLLYASMLPSGEKNSGSSSSTFFIGGPDSSGDSGGDCGGGGDGGC

SEQ ID NO: 9523 - protein, 83 aa, Bacillus licheniformis
MIFLLVLLALFILYSFFFDKNNKSSYKKAAPKSRILIRQAAAPTGVLRVIETAPGQTANRRTSEGMRPNLRLVMSPTHQNEKK

SEQ ID NO: 9524 - protein, 23 aa, Bacillus licheniformis
CEKNENVTCAVYVDGGAVRVFRP

SEQ ID NO: 9525 - protein, 71 aa, Bacillus licheniformis
LMKTDRHAQDLIHKAEKLGVKVYPVSDFWIKPHESSSSIVMAGFGGLTAAEIEEGISRLRKAWLSSSKQEQ

SEQ ID NO: 9526 - protein, 209 aa, Bacillus licheniformis
MNGRLVALENPGYDGVRSVFLNHGCDIQPIGLETDGINLTQLAATRAKLVYITPSHQFPYGMVLPIQKRLKLLEWASREKAYIIEDDYDSEFRYQGRPIPSLKALDKKENVIYLGTFSKSFLPGARLSYIVLPSKLADEFQEKLGRYSQSASPIIQKAMFLFRKEGFFERHIRKMKKVYQEKHKTLISAIKTYFGNDVESSAKKRGSIF

SEQ ID NO: 9527 - protein, 324 aa, Bacillus licheniformis
MEFILHYYPAAMIALILIGFWGSRVNSRFKKFLIILCLMTNGVYIVWRFGFTLPVSRPADIVMGVILIATECIGFLQLLVFYTLVWKEKKREPEKLGDQDHRPSVDILIATYNEERHVLKKSVAGCLNLDYPKELVNIYLCDDGRRTAIQKLAEELGVHYVTRQNNEHAKAGNLNHAMSCSNGELIVTMDADMVPLPSFLQKTVGYFKKEKVAFVQTPQAFYNEDPYQYNLFSGANIPNEQDFFMRRLQAGKDRFNAVMYVGSNTVFRRTALEEIGGFATGVITEDMATGMLLQTKFKSVFVKEVLAVGLSPETWTDLLKQRDR

SEQ ID NO: 9528 - protein, 450 aa, Bacillus licheniformis
MEAKTKVQHIPIQTTKEQDENFFARAMNVKIGIIPLPVYLLLFALIVTFVYMHDLKSDILTAIAVTGFFGFTLAQIGKSLPLLRSVGGAAILATFIPSAIVYYHLIPDDIIKSTTEFTENSNFLYLFISAIVVGSILGMKRETLVRAFIKIFIPLIAGTIAAAAVGLAVGTMLGLGFQHTLLYIVIPIMAGGVGEGAIPLSIGYSEIMHMPQGKAFALVIPSIMFGSLSAVILSGILNVIGKKKPELTGNGKVDRFDSGDAQPLESRDKDKESVFNLSYFASGGILAVSLYLVGMLSHDLFGFPAPVMMLLLAVAVKLFRLAPANLENGAYGVSRFFSTAVTYPLLFAIGVSMTPWDKLIAAFNIANIITIVSVVVTMIAVGFFAGKWLNMYPIETAIINACHSGQGGTGDIAILSAAERLELMPFAQVSTRIGGAITVTLTLLLLAQFY

SEQ ID NO: 9529 - protein, 286 aa, Bacillus licheniformis
VSALFKKLMLSSLIGVSIGSALFAPNAGAQEPAVKPKKVDVIAHRGASGYAPENTMAAFDKALQMKADYIELDVQMSKDGELVIIHDTTVNRTTDIDSVLPVAVKDLTLAELRKLDAGSFFGPQFAGERIPTFEEVLDRYKGKIGMLIELKEPARYPGIEGKVSAALKERRMDKPKNGKIIVQSFDFNSVYKIHQLLPSMPTGVLTSKAADLTDAKLKEFSGYAKYVNANLKNVAADPTLVPRIHALGMKITPWTVRSRDEVPPLLKAGVDGIVTDFPDYVPKKVR

SEQ ID NO: 9530 - protein, 89 aa, Bacillus licheniformis
MKKIAAGLLSAGLIIGFSWGAGDVAEAKTKVKTYKNCKALNKDYKGGVARTKSVKNKGGKTKYKPYVSKALYDANKKLDRDKDKIACER

SEQ ID NO: 9531 - protein, 212 aa, Bacillus licheniformis
LTKSQYFFKLHPLMVPAGWKVKENHLYQKPIRDPRHTLLILENESCGKMVQVEYAGELKYVIRMQNADQSKVSEDSDAPYEQLIERLEDLMRASDGARNLLRLRIPAGWTVAHHSLTDTNPDELAPDSKAWLSDFKRDLLKLRHDEERLLLDVEWYPECSPAGHYALKLIKNGNWDSPLEDMLCIHPKELAYEINAVLKKTCEHQYVDETGA

SEQ ID NO: 9532 - protein, 639 aa, Bacillus licheniformis
MKKIFSHKLSFFVLAVVFVWAKTYASYFLEFNLGVKGSTQHMLLFINPLSFTIAALGLALFAKGRRSAIWIIIIDAVMTFALYANVLFYRFFDDFLTFANLKQAGNLGNMSDGVFDIMAFHDIVYFADLIILIALCVKLPELKASQLKKRWAAAVVLSGVALFFINLAVAETDRPELLTRTFDRNYIVKYLGPYNYMIYDGVQAAQNASQKAYASSDDLTSVINYTNSHYAKPNDEYFGAAKGKNIIKIHLESFQTFLIDYKLNGKEVTPFLNKLAHGQDDMMYFDNFFHQTGQGKTADAELMMDNSLYGLPEGSAFVTKGQNTYQSLPAILNQKEGYTSAVLHGDYKSFWNRDQVYKQIGYDKFFDASTYDMSEDNLVNLGLKDKPFFEESIPKLKSLKQPFYAHLISLTNHYPFILDEEDATLEKGTTGDKTVDGYFQTARYLDEALEDFFKELKKAGLFDDSVIVIYGDHNGISENHNRAMKEVLGKEITPYQNAMNQRVPLMIRIPGKKGGVNHTYGGEMDVMPTLLHLQGIDSKKYINFGTDLFSKDHDQTVAFRNGNYVTPKYTMIDTTVYDTKTGKEIKGNQETENLKSQVSEQLDLSDQVLYKDLLRFHEISDFKPVDPSKYHYGKEKTGE

SEQ ID NO: 9533 - protein, 47 aa, Bacillus licheniformis
MREYFFHDNLYLFKLFSDRFLFQSMKREETIIYHSTKSLGGFTSTSW

SEQ ID NO: 9534 - protein, 185 aa, Bacillus licheniformis
LEQEKKQTFDVKSRMSFRVWVFAGTAGFGLIGAWLFYEAIKLESKYSLLYVGVGTFGVIYGLMTFLMVFPAFTKKGNIIFTIIEGEDGRIFSGKKSVLFKDIKSLKMAEHRYSPKGIFLMDILIETRGNGRVRIPTYNILPEPEFYKAVELYILPYMTEEARAEWIGQFTEAQRKAYLNEFHKDI

SEQ ID NO: 9535 - protein, 278 aa, Bacillus licheniformis
MKKKAMDIILIIIGAFFFALAVNLFAIPNDLGEGGVTGITLILYYVFEWSPGITNFVLNGILLIIGYRFLDKKTTIYTIIAVAANSFFLHVTEDWTVPADEVIISTIFAGVFAGVGIGMIIRVGGTTAGSAILARIANKYFDWNISYALLMIDLVVVFSSYFIIGAEKLMFTIVMLYIATKVMDFIIEGLNTKKAITIISEHKNEIAAQVNTLMDRGVTILSGRGHYTGDSKEILYIVINKQELSMLKKIIRSTDKKAFVIIHDVRDVFGEGFVDISK

SEQ ID NO: 9536 - protein, 146 aa, Bacillus licheniformis
MNKQKRQWLIKQTILEHPVENQEQLASLLEKRGITVSQSTISRDIKEMYLVKQPGENGKLVYTTNASLSINPSKILKDKISDVVLHVHRRDNLIIIKTMPGNAHAIGVLLDKLGSPEMLGCICGNDTCLVISQSPEAAQSFYDHLC

SEQ ID NO: 9537 - protein, 411 aa, Bacillus licheniformis
MTTPIHVYSEIGPLKTVMLKRPGRELENLTPEYLERLLFDDIPFLPAVQKEHDQFAETLKQQGAEVLYLEKLTAEALDDALVREQFIDELLTESKADINGAYDRLKEFLLTFDADSMVEQVMSGIRKNELEREKKSHLHELMEDHYPFYLDPMPNLYFTRDPAAAIGSGLTINKMKEPARRRESLFMRYIINHHPRFKGHEIPVWLDRDFKFNIEGGDELVLNEETVAIGVSERTTAQAIERLVRNLFQRQSRIRRVLAVEIPKSRAFMHLDTVFTMVDRDQFTIHPAIQGPEGDMRIFVLERGKTADEIHTTEEHNLPEVLKRTLGLSDVNLIFCGGGDEIASAREQWNDGSNTLAIAPGVVVTYDRNYISNECLREQGIKVIEIPSGELSRGRGGPRCMSMPLYREDVK

SEQ ID NO: 9538 - protein, 335 aa, Bacillus licheniformis
MNQTINLKGRSYLAEKDFSEEEILYLLDLAQKLKEKKAQGIRHRYLEGKNIALLFEKPSTRTRCAFTTACIDLGAHPEYLGKDDIQLGKKESIEDTAKVLGRMFDGIEFRGFEHEKVISLAEHSGVPVWNGLTDLWHPTQMLADFMTVKEHTGRVKGVKLTHIGDGRNNVANSLLIGGAKVGMDVRICSPQELFPDQDIVKMAEAFAEESGGKITVTSNTDKAVSGADVLYTDVWVSMGEEDKFAERIKLLKPYQVNMDLVKKTGNDNVIFLHCLPAFHDLHTTYGQNVYEQHGLKEMEVTDEVFRSKHSKVFDEAENRMHTIKAVMAATLGDLD

SEQ ID NO: 9539 - protein, 468 aa, Bacillus licheniformis
MAEEKKLGLFALIALVIGSMIGGGAFNLASDMASGAGAGAILIGWIITGVGMIALAFSFQNLTTKRPDLDGGIFTYAREGFGHFMGFNSGWGYWFAALLGNVAYGTLLFSAIGYFIPAFGDGQNIASIIGASVILWCVHFLILRGVQSAAMINLITTISKLVPIFAFIIAIIFVFHLDLFTNDFWGKGLSLGSIGTQVKSTMLVTVWVFTGIEGAVLFSSRAKKSSDVGKATVIGLISVLVIYVMITMLSLGVMNQQNLAELPNPSMAAIMEHIVGKWGTVLINLGLIISVLGAWLAWTLFAGELPLIAAREGVFPKWFGKENKNGAPTNALTLTNAIIQLFLLTFLISDAAYQFAFSLASSAILIPYLFSGLYQLKYSWLHKEPNRGKNLIIGTIASIYGVWLVYAAGLDYLLLTMILYAPGILVFRAVRKGKEGPVFNKAELLIAALILVLAVIAVIRLASGSISI

SEQ ID NO: 9540 - protein, 316 aa, Bacillus licheniformis
MKKRKIVVALGGNAIQTGDASAEAQKRALEETAMYLADMIDSGAELIITHGNGPQVGNLMIQQKEADSPKTPAMPLETCVSMTQGMIGYWLQNALDRALHAKGKGGHAATVITRVAVRSDDEAFRNPTKPIGPFYSEEEAKELMNSRNGGLVFKEDAGRGWRRVVPSPAPVSILEHDVINDLVEHGHIVIAAGGGGVPVIENGDAVSGIDAVIDKDFAACKLAELVQADELVILTGVDYVAVDYLKPTERALKRVTTEELKGYIKEKQFAEGSMLPKVKAAIQFAEAKKGNKTVITSLKLAKDALQGNAGTIVVQA

SEQ ID NO: 9541 - protein, 225 aa, Bacillus licheniformis
MKNKDIVHQLKKFPLLASLNKRDLEDMKQFIYWRSYHKGQILFMEDDPRERMYLLLDGFIKLEKSNEAGSMFYTDYVRPHTLFPFGGLFRDEHYHYAAEALTDIELYYIPMNIFEDLVRDNKNLLYDILNHLSDILALHEERLKRITLSHAHDRVTQAIYYLTESLGQKESNSTVINCPITAAEIAKISGTSRETVSAVLKKLRCEGVISQMNKQIMINRPEYFM

SEQ ID NO: 9542 - protein, 478 aa, Bacillus licheniformis
MARQTWKIPDDFILGAAASAWQTEGWDGKRPTQDSYLDMWYKNDPDVWHDGYGPAVATDFYNRYKEDIQYMKDIGLTHYRTSINWSRFLLDYETAEVDEVYAGYIDDVIDELKRCGVEPMLCLEHYEIPAVLLEQYGGWGSKHVIGLFAAYAEKAFERYGDRVKYWFTFNEPIVPQTRIYLDALRYPYEQNTKKWMQWNYHKALATAKAVAIFRKRKPSFREGAKIGVILNPEVAYARSSAPHDQKAAQVYDLFFNRVFLDPSIKGVYPDELMELMAKHDILFDHDEEELSVIKRNTVDFVGVNLYYPKRVQAPSRQWNESTPFHPAYYYEPFELPGRKMNPFRGWEICPRIVYDMAMRLKYEYGNIEWLIAENGMGVEHEERFKNEEGVIQDDYRIDFISAHLREAMKGIADGANCKGYMLWAFTDNVSPMNAFKNRYGLVEIRLENNRSRALKKSACFYRDIIKNRRFETEEFRYK

SEQ ID NO: 9543 - protein, 439 aa, Bacillus licheniformis
MSRMAKVTEMFERVAFKITSFKYIMVIKSAFVTLMPVIIAGAFAVLMQNMVMSPETGLAVFRPFRFLSALEPIMASINYATLNFITIGAVFLIGIELGKLNGHESFFPGLMALMSYISVIPSAVLLEVNGSMQEVVNVLAKEFTDPKSLFLGMFISIVSVEIFSKLSSMDRLKIKMPDSVPANVSVSFGTLFPSIITVTIIASFGFAFHRLTGVYLHEAVYNVVQKPLEGAIQGLPGILLLVFVAQFFWVIGIHGNQMVKPIREPLLLASITVNMNAYAAGESIPNIITMPFWDVYMSIGGSGVTIGLLIAMFIAGKREDLRSITKISFGPGIFNINEPVIFGVPVMLNPLMAIPFIVTPLVTGAIGYIATAAGFAGKAVVMVPWTTPPIINAWLSTGGSLGAVVTQIVCIIVSVLIYLPFVILLNQTFTISSEKNVSM

SEQ ID NO: 9544 - protein, 51 aa, Bacillus licheniformis
MTRCFSETAGCLLCWPSNLKNFLSQRKKYAPKRKRFHCKVKANHQKKGESK

SEQ ID NO: 9545 - protein, 463 aa, Bacillus licheniformis
MDKQRFKNEVNKIDVPTKEIRESIDKGIKRAKREKTFRPKRAVKRTVFVSSAAAVLLLGSGFVSPAMQSVLADVPLIGKAYQQFHDYVGQNLVAGQLVTELNEKASSNNIDVTATSVYFDGGIIGMTFKVKSDTRKDLDDGARMIHFTLFNGERKWAIASQGDLKKTEDGYTGYIQVGYPDKHIPDKLTLPVTITNINGIRGKWKFDIPVDKLPYKTLHITKNNTQSADGHKLAVKTVILGKESTVIDYEVSNSEEHPNDRTSVIKVTDDKGNEIPYLSGGQWTTDSTKNGNKVRHEERLILGKVNKGTKHLKIEASSSMGDSEKTLPLTKTPAALSADRHDFQIAVDQVKQNGSKLSVDYHLKHVDQSKIDIDSMQNFLETMSLVDSAYKSIDEAPMGHSVKGNFTKVLDPKKLRFRSDFTLDGEFGAKNFSLDRYSLDVEFGYLSAFYSTPFKPIKVQLPQ

SEQ ID NO: 9546 - protein, 182 aa, Bacillus licheniformis
VKQIRLVKKAVAGNAKAFEMLFQKHSEQLYRTAYIYVRNKEDALDIVQETAYKAFLSIAQLRNPEYFLTWLTKILIHHAYAILDKKKKVVLMDRPLLDEGREQEMHADDRIGMLEAVQQLRKEYQTAIILFYYHDLPIHDIAEVMNAPEGTVKTYLKRAKLELKQLLTGGEDAWTNNGSKTK

SEQ ID NO: 9547 - protein, 137 aa, Bacillus licheniformis
MAKGYTNEGTKWEFAHSFWLVFTWVPFGFLSWFAFIYIAARTKQGKWLFAGIGYAAAVLLAAFTARTFLFDLAMKALLIVWIISIIHAFKTRAEYLVRLEAVYRIKRSSMNDLREELIHEQAPHGQTGTSKVTLTKK

SEQ ID NO: 9548 - protein, 410 aa, Bacillus licheniformis
MKNKLIERLISYAKVDTQSNENSQTTPSTPGQLALANMLVEELKEIGMKDVTIDENGYVMATLPSNTEKEVPTIGFLAHVDTATDFTGKNVNPQVIEQYDGKDIVLNESLNVVLSPKEFPELADYAGHTLITTDGTTLLGADNKAGISEIMTAMEYLIAHPEIKHGKIRVAFTPDEEIGRGPHKFDVEAFNAKFAYTVDGGPLGELQYESFNAAAAKITCKGTNVHPGTAKGKMVNAAKIAMQFHAALPENEAPEFTEGYEGFYHLLSIKGDVSETSLSYIIRDFDRDRFNERKDTVQKIANNLKAKYGENSVTVDMNDQYYNMREKIEPVKEIVYIAYKAMKNLDIEPVVKPIRGGTDGSQLSYMGLPCPNIFTGGENFHGKYEYISADNMVKAANVIVEIVKLFEERA

SEQ ID NO: 9549 - protein, 492 aa, Bacillus licheniformis
MNRIQQAEEALKKAGKKVNRRYRMGYHMMPRANWINDPNGLIQYKGEYHVFYQHHPYDENWGPMHWGHLKSKDLIHWEHLPVALAPGDEFDESGCFSGSAVEYNGDLALIYTGHNMIDEEKDDFYQTQNIAVSKDGIVFEKLKENPVIAEPPEDSARHFRDPKVWKHRENWYMVVGNSSKENVGRVILYRSPNFVDWEYVGVLAQSDGNLGFMWECPDFFELDGKHILLISPQGIEADGESYQNLYQTGYLIGDYDEETNEFVHGSFKELDHGHDFYAVQTLLDDKGRRIAIGWMDMWESEMPTKADGWCGALTLPRELTLKDGHKILMNPVEETKLLRGSEHHECDNQSISGSYFIKTAEKLLEVVAVFDLTICSAETVGLKIRGIEQEETIIQYSLVDHKLTLDCSKSGKARDGVRNVRLEADEKLTLHLFLDRSSIEVFANHGEATMTSRIYPKEGRAGIELFSEKGNVRVEEFTYWTLKDIWKGDEAK

SEQ ID NO: 9550 - protein, 411 aa, Bacillus licheniformis
MKSSNSLYWKLSAYFFFFFFTWSSSYSLFAIWLGQEINLNGSATGIIFSVNAIFTLCMQPLYGFISDKLGLKKNILFMISLLLVFTGPFYIFVYGPLLQYNVFLGAIVGGIYLGTAFLAGIGAIETFIEKVSRKYQFEYGRTRMWGSLGWAAATFFAGQLFNIDPNINFWVASASAIILVAIIVSVKIEMTDDEKERADSVGLKDVGGLFLLKDFWFLMLYVIGVTCVYGVYDQQFPLYYASLFPTAALGNQIFGYLNSFQVFIEAGMMFLAPFIVNKLGPKKSLILAGLLMAFRIIGSGLVSGPVGISSMKLIHALELPIMLIAMFKYLATNFDNRLSSVLYLVGFQFASQVGTSIFSPLAGGLYDSIGFRHTYLIMGAMVLCFTLISIFTLLDSKKDVEFAQNLQSNHI

SEQ ID NO: 9551 - protein, 282 aa, Bacillus licheniformis
MRRKFGPLTILEYICLVLLAALFIFPLIWMVASSMKPEADIYNNISSIKAFLPSFHPSEWFQSYREVLSRFDLLMYIGNSLFYGLCVAAGAVIINGMAGFAFAKLQFTGKKVLFTILLALLIVPMETILISQFTIVHKLGLVDTRLAVILPALAGAFNIYLFRNFFMAIPGEMIESAKLDGANTWQIFWRVMLPMSKPAVATVGTLAFIGSWNDYIWPLMVLTDKSKFPIQVAITAINSTEPVYTNQVMAVLTISTIPLILIYIVAQRYILDGLGGSGTGIK

SEQ ID NO: 9552 - protein, 312 aa, Bacillus licheniformis
MNKIPLKEARTAFPLKKIPASKIGWRDNVLAYTFLGPALLILSVFLVIPSIMAVYYAFTDYYLLTPDLRKFVGFDNFIKLFKDPIFLKSLSNTLKFVVLVIPLQIGAALGLALLLNKKRKANTFFKVAYFSPVVMSLVVISVLWLYLLNPNEGMINNVLTHVGLPPQPFLTSPNQAIFTIVFVSVWQGAGFQMLIFLAGLQNIPGDVYEAAQLDGMNKWQRFIYITLPLLKPTSVFIFITTLISAFKLLVQPMVMTQGGPVNSTMTVVYYIYQTGFTDRMVGYASSIALLFGTIIGLVTLAQRKLVKEDEGG

SEQ ID NO: 9553 - protein, 432 aa, Bacillus licheniformis
MKRWLFGIFSLLLMFAMWGCSNSKSANSQDGKTLTMWVHVSDDSEEGKVYQKRVDAFNKKYASENIEAKIDFIPRSGNGGGYEDKVNAALTTNTLPDVITLDGPNTAAYAKSGVIAPLDEYIKDQDDLLPSIKQQGTYQGKLYAIGVSESSVGIYYNKKMLKDAGVDLKTLPTVENPWTWDEFLELCKKLKNKYDKPAIDMQLQSKDEMLTYALLPFVWSAGGDVLSKDGKKAEGVFNDKLTVEAMTFIQTMLKEGYTTRTPVKQAFETEKYPMKMSGVWTVTDMETNFPNVDYGVMPYPVSPKTKKLVSPSGSWQFAMTQTSENKEWAAKLVDWMTNKESNLELSRSIAALPVRYSSEKVLAKEFSDEMNVFLQQLKETGHARPVTPAYPQVTRAFQQAIDDISFFDQHQDIQSVLDTRAKEMQSAIDKAN

SEQ ID NO: 9554 - protein, 324 aa, Bacillus licheniformis
MKPSIHDVAKKAGVSPTTVSRVLNNRGYISEKTKEKVYKAMEEINYFPNDLARSLFRKRTHLIGLIIPNSSNPFFGELAFHIESICAAMGYKLLLCNSLNRKDKEEKYLEMLMRNQVDGVIAVTYNRGILNYHRQNLPIVAIDHYLSETIPVIGSDNYDGGRKATELLIAKGCRHIIHINGPIELKTPANLRRKAYEDVMRQHGRQPITYEVPFHQNYREIISKLFDEQPAADGIFASDDLMAATVITEAKKRRKDIPGQLKVIGYDGTEAVQSILPELTTIQQPIELISKTAIEILSKAIEGEFDDLPLETYLPVQLLEGETT

SEQ ID NO: 9555 - protein, 176 aa, Bacillus licheniformis
LNVSHFFPETLVSLVKDMLTKTDGSTTKAIETLIGGKAEIEVFQQNNIDYDKLSPEEARLFQRDDDILFRTSSLKTGDDYLSYNYVYVKTNLLPPAIKQDLQEERLPIGKIIAELESRREIFSTGDCLGKHFTQLVPVSADRTYAFKKYQIISGRQCMFYVCELFDLEKICKLTAG

SEQ ID NO: 9556 - protein, 227 aa, Bacillus licheniformis
MNKKTVFKAFGMLMTGVLFFALYSAAALPSAHAANEKKPTVTSHTYKNIKALKYPQVSNVSPKSLQNKINKDFKHYIEQSYKDYVKNKKDGQQHGYQTDYQTSFEVKYRTGQKLSILTSNYVYSGGAHGNTAVRSFNYDLVSKKRVYLSDILNTKSKMDKTKTYIYNYIQKHSDIFFPDVKKKDIVLGKNTAFYYTNDGIAIVFQQYDVAPYAAGNPVVAVPKTVYQ

SEQ ID NO: 9557 - protein, 53 aa, Bacillus licheniformis
MCEFFVRTAVQTVNKMLNKQNKLEFFSIFISKNRNFLLSSPVYNVYLISKWVL

SEQ ID NO: 9558 - protein, 376 aa, Bacillus licheniformis
MTQSTDVLKQTPGRKIGPYRADQVGSLLRSEPVKKARLQKANGEISAEQLREVENEEIKRIVEKQKEIGLKAVTDGEFRRSWWHFDFLEGLDGVEGYTADKGIQFHNVETKPRGIKVTSKVDFTNHPMLEDYKFLHDIAGTHTPKMTIPSPNMLFFRGKLGESPYEDLDEFHHDVAQAYKKAIRAFYDAGCRYLQLDDTAWSVFFSDKGHEQIKAFGRQPDELRQSFANTINEAVEGRPDDLTVTMHICRGNFQSTWVAEGGYDAAAETIFDGLNLDGLFLEFDDERSGGFEPLRYVQRKDLQIVLGLITSKFGELENPDDIKRRIEEASRYADLNQLCLSPQCGFASTEEGNLLTEEQQWEKLRHVVEIAEDVWK

SEQ ID NO: 9559 - protein, 744 aa, Bacillus licheniformis
MIKKRKIDIFLVFILVLSAALNLYGIWNSDTDNAYYTAAVESMTQSFHNFFYASFDPAGFVTVDKPPVALWIQTLFALVFGVHGWSVVLPEAIAEVISVALLYFIVKPTFGKTAARISALIMACTPIAVAVSHTNNVDSILVLCLMIATWLLFKAVRKGKIGWLLGAFCMIGVGFNVKMLQAYMVLPAFLLFYMIGAKTTIRKKVVSLITAVIVLAGVSVSWAVVVDSQPESSRPYIGSSQTNSVLELAFGYNGIQRLTGQNGAGGGGTSSSDHDQKNQQQSGDIENNSDSANGQMAPPSGGEMPSGGPDGRQGDVQSGGGGPGGGTGGMFGTGTPGPLRLFQSELSGQASWLIPFVLFGIIGLLIAGLRRQRKFNETTTETIFWMMWLLPVAAFFSIAGFFHHYYLIMLAAPIAALSGAGWTALVRLYQEESGWKKRLLPIGILLTTAFELYILSPYLSEIGFIWSILIGAFGIVTSCLLIFLKKGKSFSYYVSLAALLGMLIGPFYWTTATLADGVNGMIPQAGPKSAQSFAGGGGGGKMQNNDGSGPPGFGSQDGQTYSNQNNNNGPGFGPGSNSQNSNDSSADTGSGQNSQNQNDEGASGRQQGRPSGGGSPGSVESVDEELLSYLEKNNTGEKYLFAVSSATSAQSYIIKTGKAVMAMGGFSGSDPILTVEKLEKLVKNGEVKYFMIGDGRGRDNSEITNWIKENGTEISKSEYSSSSSDDSQSGGPGGNQTLYKVELD

SEQ ID NO: 9560 - protein, 325 aa, Bacillus licheniformis
MQKQVTFSIVVPVYNEAEVLQSTYDRLKTVMDSTGDPYELIFVNDGSSDDSIHTLKSLAQSDQAVKCINFSRNFGHQIAITAGTDYAAGEAIVVIDADLQDPPELILEMAEKWRQGFDVVYAVRTKREGETFFKKQTAAMFYRILRKLTDVDIPVDTGDFRLMDRKVVNEMNKLKEKNPFVRGLVSWLGFKQTAVYYERHERLAGETKYPLKKMLKLSLDGITSFSFQPLKLASYSGIVLSAIGFIYAFIVVCMKLFTTSTITGWSSMIILQCLFSGFILIILGAIGEYIGRIYDEVKDRPLYIIDGKYGFEEQRRARAPQRHIM

SEQ ID NO: 9561 - protein, 331 aa, Bacillus licheniformis
MSVLVVGGAGYIGSHAVYTLIEKKERVVVVDSLATGHAEAVHSEAAFYKGDIRDRHFLKQVFENEDIEAVMHFAASPISSKSKNVFTSFNENITGMETLLDVMKEYDVGRIVFASSAAVYGSPEDLPVTEETEPEPVHAHGKVKWMMEKMLMEAEKAYGLKYVILRSFNACGAHPSAIIGEDRGSETHLISNVLRTALGHLPFVHIDQSEDGTGVRDYVHVQDLAEAHVLAISHLRKGKDSRIYNLSYGESYSAEQIILAAQYVTGIPLIAAKLTETDIDSQATFAASSSRARKELGWTPQHNSLIAIIRDAWNWHSANPNGYASEKVKQG

SEQ ID NO: 9562 - protein, 48 aa, Bacillus licheniformis
VNSAEIKYFNKNYVAIQFLYDFIWYGSGYIDMLIDLQDKKHPTAYLID

SEQ ID NO: 9563 - protein, 46 aa, Bacillus licheniformis
LLVITNCGKDDDAFTYQKGYPKEDSPAFKEYMRIKSGLAGRCDVKA

SEQ ID NO: 9564 - protein, 387 aa, Bacillus licheniformis
MIRKRFINLTALIVLLLVITGCGKDQNQEITYKKGFPKEDSRGLTEFMKSYLTGSTDKKILEENDVTLFSTVNHQGQAIRYFQYTQDQLKVYYKPLFTAKKPKTTLNSLYQIERLEKLLHHPIQDKEKYHLPAIKMLSNNQLQVKTKKNKKTLDLPKLLKNYGVKKSDELEINLYAVNSKCFSVVIQDFSMKDRINSTIGLFITQDLTNIESTVITREKLQNTLSKGKLKDYYDLFTKVDKSGRYLLLFFDDMILDKRTNQLIDIKKDDYLSKDGKYVYINGAKEQETNVMPDGIQQIQTVDNYLKGNEKYEAQFKIDFKQIAKEMDFNAGDARIANIQYFNKDYVVLYISYHGKTIGTAGSVNVLIDLQKNKQQPTAYLVDLGIES

SEQ ID NO: 9565 - protein, 477 aa, Bacillus licheniformis
MAYHNREKEITNILKNHERKANQLLRLAQSSRLLDTFNKIWVSIENKELPNFVSKNVMDFNVADIKSEINDWIKDLKECQENARRKFESMEDPTPEDLRKRNNISSDAVLLISQYENLKNGIDQVEQDFSNVARTHRAPMREALTDLSILYNSVYHVKGDFSDYKNVSVYVHGIEDDGDGFNKSVRKAAKDGDIIIRINSDKTREYYIVEIINGEKVIKRVEGLKKLKDTKQYKAKAGRVHIVYETEHMNEHRQATSDDLAEKLNEMGLMNEKTKIDMFGHSYGGRRSLQFAMDYADHVRSITTIGTPYDKNLLATGANRARWLADSPLAKRHTTDTSEYLDFKEDNRNNDEGKDYSNAYTDMDSKAMTDDINHLKSANPEVYQKLQKMDITAAAGYRTEDTVSFSPYYTASGKHKINSDDIVSVESQHGEILGNLIDERPEIEVKGSGVTNPGHIYEVEDSEFVDLIREVNKKEAE

SEQ ID NO: 9566 - protein, 212 aa, Bacillus licheniformis
MGHFRFNKELSHKAAGTISQLENAFSHVFENMVFFREELDRHSGKAAAALQKKMSDNINFFSKASSCLLYFADSVRCFAKAVELTDESDKPANVQPQSRSERNHTFSAERVQSEIKVNGESLHQATGKFESNLSTLDEVLHHFDTMLREMMYETEFPWEKFDDVWSDAKSHINSIMTELKKRVKELSANAKNIVKELKRVDNIISQQLQRVK

SEQ ID NO: 9567 - protein, 98 aa, Bacillus licheniformis
MLLKKNYLPVGSVVGLHNDSRRLLVIGRQMFSETNHVIRDYAAVDYPNGFTDPKEQLVLFNKQDIEVVYHYGYVDQKELQLDELLTEAEAGKKENKEQ

SEQ ID NO: 9568 - protein, 41 aa, Bacillus licheniformis
MKMPKILMRKYMMPTPECFLKIKKLLFFMGSDKESMKNKSK

SEQ ID NO: 9569 - protein, 397 aa, Bacillus licheniformis
MYFLINILGIFIVMSVIYFCSPRKKSVKWRPILSLFIVELLVTWFMLGTKIGGWAINLIASFFSWLIACASDGIAFAFPSVMGNETVDFFFSALLPIIFVVTFFDILAYFGILTWMIDKIGWVISKVSRLPKLESFFSIQMMFLGNTEALAVIRGQLAVLKDNRLLTFGIMSMSSISGSILGSYLTMVPATYVFTAIPLNCLNALILASILNPVEVTKDEDIIYVPPKEEKKDFFSTISNSMMVGMNMVIVILAMVIGYVALTSCLNGILGLIVDGLTIQKIFSYIFSPFAFLLGLAPGDAMYVAQLMGMKLATNEFVAMMDLKTQLDAISPHTAAVATTFLTSFANFSTIGMIYGTYNSLFNGEKSAIIGRNVWKLLVSGIAVSLLSAGIVGLFVW

SEQ ID NO: 9570 - protein, 693 aa, Bacillus licheniformis
VNNNDGRRKVNGHSKDQQLEQYRSDNRGKKMTTNQGLRVSEDEHSLKAGVRGPTLMEDFHFREKMTHFDHERIPERVVHARGFGAHGYFQVYEPMTEYTKAKFLQDPSVKTPVFVRFSTVAGSRGSGDTVRDVRGFATKFYTEEGNYDLVGNNIPVFFIQDAIKFPDLVHAFKPEPNNEMPQASTAHDTFWDFVANNEETAHMIMWAMSDRAIPRSYRMMEGFGVHTFRFVNEEGKARFVKFHWKPVLGVHSLVWDEAQTIAGKDPDYHRRDLWEAIERGDEVEYELGVQMIDEEDEFKFDFDILDPTKLWPEEIVPVKIIGKMTLNRNQDNVFAETEQAAFHPGHVVPGIDFTNDPLLQGRLFSYTDTQLIRLGGPNFHEIPINRPVCPFHNNQYDGYHRMTINKGPVAYHKNSLQNNDPAPASEEEGGYVHYEEKVEGKKIRQRSESFNDHYSQAKLFWNSMSPVEKEHIISAFRFEVGKVKSKDVRRQVVHMFNRVDGELAKQIAAGVGVEPPEKDEGSNVTFKSPALSQENTVKLPQTRTVAILAEQGFDDEDLSRVLKEFKKAGIIPDIVSSALGVIEGAGGTEIEVGNTLQTVDSVLYDAVYIPGGQESIERLKLHKAASDFVNEAFGHYKAVGAAGEGVDLLLSAAGAHAASQPGIITSRGDKNKDDFGKKLVEAISRHRHWDRQV

SEQ ID NO: 9571 - protein, 150 aa, Bacillus licheniformis
MKFKIETLPNYRIAYMRRVGPYGPANIEVMERLKKWAKKKDLLESAILFAIPQDNPKTTPPDHCRFDACIVIPHDYQVDDTVFEGEISGGQYLIYEVEHTAEAIQKAYSDIFSSLQNNEYQLDNRPIMEKYVGDMVNSPYCEICVPLKSV

SEQ ID NO: 9572 - protein, 472 aa, Bacillus licheniformis
MKYKTLAQFPKDFLWGASTSAYQVEGAWDEDGKGPSVIDARESYPEGTTDFKVASDHYHRYKEDIPLFAEMGFKAYRFSIAWTRIIPDGDGDINPKGIEFYSRLIDELLKYGIEPIVTMYHFDLPNALQKKGGWSDRATIDAFEKYAKVLFESYGDRVKYWLTINEQNMMILHGSALGTLDPNLENPKKELYQQNHHMLVAQAKAIKLCHEMLPEAKIGPAPNIALIYPASSKPEDVLAAFNYNAIRNWLYLDMAVFGRYNTTAWAYMKEKGCTPVIAEGDMDILRSAKPDFIAFNYYTSQTAEASRGDGSDTAARGGDQHLQTGEEGVYRGSSNPHLKKNAFGWEIDPVGFRSTLREIYDRYQLPLIVTENGLGAFDQLEDGDVVNDDYRIDYLKEHIKQIQLAITDGVDVFGYSPWSAIDLISTHQGCSKRYGFIYVNRDEFDLKDLRRIRKKSFYWYKNLIATNGETLD

SEQ ID NO: 9573 - protein, 619 aa, Bacillus licheniformis
MNVQSMAKEILARVGGEKNVVSLVHCATRLRFKLKDRSKADREALENTDGVVTVVESGGQFQVVIGNNVPEVYKEIGRISQLLESSAADHSQKEKGSLAGRLVDVVSSIFTPLLGVMAGAGILKGLLLICTNAGWLSPEETTYTILYAAADSLFYFLPLLLAVTAAKKFGANPFIALTIAGALIYPTILELKNSGAHTEFFGIPVVLMNYTSTVIPIILAVFVMSYLEGLCMRFIHESVKNFITPIICLTVMVPLTLIVFGPLGVYTGNGIAAAILSVFDLSPILAGAIIAALWQILVIFGIHWGIVPVILNNIAVHGKDYIKPATAAAVFAQTGAAFGVMLKTKNKKLKALAGSAAVTGIFGITEPAVYGVTLRLKKPFVCGVISAAAGGAIIGYSGSVALASGAPGLLTIPIFYGPGFLGFIIGISVSFVLSILLTYIVGFDDPVEVTKEEPVEKSAGEPIYSPLQGEVLPLTEVSDKVFASGALGEGIAVVPSKGVVTAPADGIVTTAFPTGHAYGITTESGAEILIHIGMDTVRLEGKHFNPKAVQGQNVKRGDILAEFDLDALKEEGFDVKTPIIVTNSGQYTDVIPTDQKKVKTEERIITLISSPREENNHEI

SEQ ID NO: 9574 - protein, 277 aa, Bacillus licheniformis
VKIAKVINNNVISVLNEQGQELVVMGRGIAFQKKPGEAVDESRIEKIFRLDNKDVSERFKTLLDEIPIEFMEMSEEIISYAKLKLGKKLNDSIYVSLTDHIHFAVERHKKGLDIKNALLWETKRLYKDEFAIGKEALAIIEKKTGTALPEDEAAFIALHIVNAELNEEMPNIVNITKVMQEILSIVKYHFHIEFDEESLHYYRFITHLKFFAQRLFSGTYMESRDDFLFETVKNKYRDAYVCTNKIRQYIEKEYGHQLTNEELLYLTIHIERVVHQK

SEQ ID NO: 9575 - protein, 244 aa, Bacillus licheniformis
MKSNGSLLSALNPSAKLFSHLLVMCILMFVSNPKPTFFIWLFAVVIGIFFGGWTLSYLSKRLLPYLIFFILVFWMMAAFGKGEETIWEWAWFRVTEESVGNGLTIALRMLGFVTYGLLFTSTTDLTQFIMSLIHQCRLSPKWAYGLLAGFRFVPLFQSELSQMKAAHKIRGYKQKNSWKAFIRYALPLFSQGIRKSERIAVAMEARGFTGTKDRTYYQTAGLSGKDFVYFAGLASVAAGILLTF

SEQ ID NO: 9576 - protein, 530 aa, Bacillus licheniformis
MRSFLGCSNLSVRFYHRPETVLDRVSLSIEQGEKVLILGPSGSGKSTLLSVLSGIIPEHIEAEVRGEVNRRKSAGVMFQDPDSQFCMLHVDEEIAFSLENRSVPPKDMDRIISELMELVGLKIDKKTPIETLSGGMKQRLALACLLALEPEVLFFDEPTAQLDPASRQDIFALLRDVSRKSGQTMVFVEHVLDGCIEWMDRVILFNEKGQIIADGKPEEIVKHFQPEMKAAGIWQSKLYPAVWEDVTTQDDHPLAVKLSSTLKMKEEEAKNRPSADRDILIRTEDAAIGYRKKIVADGINLEIPRGEWISVIGGNGSGKSTFLKSLIRLEAVKKGRIYLEGRELKKWSDRTLYEKAGFVFQNPELQFIRDTVFDEIAFGARQRSWPEEQVERKTAELLQEFGLDGHQKAHPFTLSLGQKRRLSVATMLLFDQDLLLLDEPTFGQDEKTAKELIKRLKERQERGTTIVMVTHDMDIVDEHSDRVIVFHQGKAAYQGTPYQLFSDQDLVRRFSLIPPLHYRFMHERKERVPV

SEQ ID NO: 9577 - protein, 199 aa, Bacillus licheniformis
MNWNMKEVVMTVILSVACGVIYLGWSTLWIPVSAIVGPVGANFMFGIWVIASPIVAYIIRKPGAALIAETAAAAVELLTGSHFGLSALLIGVFQGAGAEIAFAIFRYKRYNLFTLMLSGALAAVGSATYSLMANGFAYYTTQTLILTLIIQIISGIVLGGWLAKAVVEALAKTGVLNQYEIMKEHRKKDDADAFISRMQ

SEQ ID NO: 9578 - protein, 228 aa, Bacillus licheniformis
MSFSAELRREADPIFEAIFEHPFVLGLASGRLEKEQLIHYVKQDYEYLNAFIQIYGIAISKCQNRKDMEMFHEQISFVLDSEVHPHKNLCRAAGVEYETLQGYPLAPSAHHYVRHMLTAAHEGTLGEILAVLLPCPWTYWEIGKKLMKDVQPDPSHPFYDWICFYGNRTDSITTKFCARLDEWAETAGKAEKEKMKELFLQSCQLEYGFWEMAYTVEDWPVEMGAVRR

SEQ ID NO: 9579 - protein, 52 aa, Bacillus licheniformis
MMMFILILTMAVYLFYSFSKDNRPAKTNNRNHQTLTVIRENSFTAPSNDVNC

SEQ ID NO: 9580 - protein, 423 aa, Bacillus licheniformis
MLKEKQLAESWEHEERWKGITRPYEAADVIRLRGTLEIEYTIARRGAEKLWKLLHTEDFVPALGALTGNQAMQQVKAGLKAIYLSGWQVAADANMSGSMYPDQSLYPANSVPEVVKKINRTLQRADQIHHMEGKEDIDWFAPIVADAEAGFGGQLNVFELMKSMIEAGAAGVHFEDQLSSEKKCGHLGGKVLLPTQTAVRNLIAARLAADVMGVPTILIARTDANAADLITSDVDSYDAPFLTGERTAEGFFKTKPGLDQAIARGLAYAPYADLIWCETSEPNIEEARRFAQAIHEKFPGKLLAYNCSPSFNWKAKLDDNTILNFQKQLSEMGYKFQFVTLAGFHALNHGMFELARQYKHRGMAAYSDLQQAEFASEVHGYTATRHQREVGTSYFDEVAQVVTGGTSSTTALKGSTEAEQFQS

SEQ ID NO: 9581 - protein, 529 aa, Bacillus licheniformis
MKTEEKRIHITGSINPHYEEILTKEAMEFIGRLERHFGGRRRELLHLRTIRQAEIDQGKNPCFLAETKHIREADWTVAPLPRDLEDRRVEITGPVDRKMVINALNSGAKVFMADFEDANSPTWKNCIEGQVNLRDAVRGTISFTNEQGKRYELKENPAVIMVRPRGWHLEEKHVLIGGRPVSASLFDFGLYFFHNAKELIKKGSGPYFYLPKIENHLEARLWNDVFVYAQNDLRIPQGTIKATVLVETILAAFEMDEILYELKEHSAGLNCGRWDYIFSFIKKFRNRDEVILPDRSAVTMTVPNMRAYSLLAIQTCHKRNVHAIGGMAAQIPAKDKPEINEAAFAKIREDKEREVKDGHDGTWIAHPGMIQTALDVFNQHMPSANQIHRKRKDVKVEEKDLLEVPKGRITEAGVRTNISAGIRYLASWLSGRGAAPIDHLMEDAATAEISRAQLWQWIRHPKGVLDDGRKVTAGMVKMMKEEEMQKIFEAAGMERFRNGRFEEAGQLFEQLILDDEFAEFLTIPAYEKM

SEQ ID NO: 9582 - protein, 45 aa, Bacillus licheniformis
MSLKSPMEFFRTLPKKTCPECGEKMEEQAESYFMECERCLAKKGE

SEQ ID NO: 9583 - protein, 40 aa, Bacillus licheniformis
LFVFYFHHHFHLFMFPILEEKYEQAMNKKRTIYFCLNGKK

SEQ ID NO: 9584 - protein, 693 aa, Bacillus licheniformis
MMKIKNKQLDVILVLILLAALILNTYNIWLDDAANQYYLAAVKSMTQSFHNFFFASFDSSGFVSVDKPPVVLWIQTIFAKIFGVHTWSVILPQALAGAGSIYLLYALIKPKFGKGAARISALVMALTPIAVAVSRTNNIDSMLVFTLLLGTWCLMKAVKQGRLIWLLAAFGLIGLGFNMKMFQAFMVLPAFLLFYLIAAHANWKKKIVSAVLSLIVLTGISLSWALAVDYTSADSRPYVGSSQTNSVLELAFGYNGTERLLGQTTGNARGHMNGFGGDMQQPNGNAQAQNGNRSSGGSNGQNGAMQPLGAGGTADGSSQGANGGSQQPAGGGPGGGNGGPGGNGGPGGGQGGGQSMNMFGTGDAGPLRLFQSALSGQISWMLPFALLGLLGTIITWFRGRREKAGEMKETIFWSAWLVPVAGFFSIAGFFHHYYLIMMAPPIAALSGIGWYAMYGLYNNHKDWASYLLPAAVLTTAAFQVYILSAYTNQIGSAWMYVMGILGLGVTIALLMLKRRHPFGKQLTIISLCVLLLTPVYWSATPILYGGNRVLPESGPQLQSSNGGGMFSSDVDTGLLTYLRENNTGEEYLFATLTTVTAATYIINADENVMALGGFNGTDPILSVSELKNLIKKGRVKYFLISENSGNSELVSWIKENGTEISSDQYSSTDSFAQQGARGGPGVGQRQTLYKVEL

SEQ ID NO: 9585 - protein, 646 aa, Bacillus licheniformis
MSINQLIIRNLKKNIRNYYLYVFALIFSAALYFAFVTLQYDPAINEVKASIKGAAALKAASILLVAIVAVFVLYANTIFIKRRSKEIGLFQLIGMRKQKIFRILSLENVMLYFGSLVIGVFAGFSISKLVLMILFKIVDVQAEAKLNFSVEALVQTVIVFCGIYLLVMVMNYAFIKKQSILSLFKVTSATEDKVKRISVFQMIIGLLGILFILSGYYVSTELFSGKFKTVDELFYAMSFILGTVIIGTYLFYKGSVSFVSNIIRKSKGGYLNIYEVLSLSSIMFRMKSNALLLTIITTVSALAIGLLSLSYISYYSAEKTAEQNVAADFAMTNQKDAKRFEQLLGENNISYNKKEIHVIQAVFNLEKIVDGDPENMAGDPGKLPLAVVSDAEIAGMDVHKGDVIFSGYNDLLQKLMALKETGAVKVKSRHETIPLNYLGLKKESLLSFNFTSGGLPVAVVDDALFKRLSQDKDPKLQQKPSLFYGINLKHEDQLQQANELFATVNQNDQHLSLLDASTAQKSLFGLAMFIVGFLGLTFLITSGCILYFKQMDESEDEKPNYTILRKLGFTRNDLLKGIRIKQIYNFGIPLVIGLSHSYFAVQSGWFLFGAELWTPMIIVMVLYTVLYSIFGLLSVLYGKKVIKSAL

SEQ ID NO: 9586 - protein, 253 aa, Bacillus licheniformis
MMILEAKKIRKSYGNKHNKHEVLKGIDLQIQKGEFVSIMGPSGSGKTTLLNVLSSIDQVSGGTININQAEMTNMKEKQLAEFRKQHLGFIFQEYNLLDTLTVKENILLPLSITKISKKEAGQKFEEVAKELGIFELKDKYPNEISGGQKQRTSAARAFIHEPSIIFADEPTGALDSKSASDLLNKLSQLNQKRRATIVMVTHDPVAASFCSRVVFIKDGQIYTQLNKGGQDRQMFFQDIMKTQGVLGGVQHEH

SEQ ID NO: 9587 - protein, 334 aa, Bacillus licheniformis
MLKAFLTERRSWIAIFVLQQILFLFIAYVDASIPFTSILYMTYLSSFIFIVFVIVRFRKETKFYKSLEEWDHNLDVTNIREAETPFETMIEKSIAEQTKQLKQEAAQHRLALENEKDELMAWIHEVKTPLTAMHLIMETIEDQSLKARLAYEWLRIHLLLDRQLHQKRMSFIENDLSLEVLELKPMIFKEIKDLQSWCIPKGIGFDIQLEAGEVLSDAKWLSFIIRQLLTNAVKYSEASDVLIKSYEQDGKVHLAVQDFGRGIDPKDMPRVFDKGFTSTTEHHDQAATGMGLYLAKKAAKPLLIHIEVDSKPGTGTTFTLIFPMRNEFSRVLGV

SEQ ID NO: 9588 - protein, 228 aa, Bacillus licheniformis
MFKLLLIEDDESLFQEIKERLTGWSYEVYGINDFSEVMQEFAAIKPDCVIIDIQLPKYDGFHWCRQIRSRSNVPILFLSSRDHPADMVMSMQFGADDYIQKPFHFDVLIAKIQAIFRRVYDYNTEPEILKKTWCGATVDPEQNRVSNKAGAIELTRNEMFILKQLIDQKNKIVSREELMRSLWNDERFVSDNTLTVNVNRLRKKLDALNLGQYIETKVGQGYMAKEEG

SEQ ID NO: 9589 - protein, 469 aa, Bacillus licheniformis
MTEQTKKFPEGFLWGGAVAANQVEGAYNVGGKGLSTADVSPNGVMYPFDESMESLNLYHEGIDFYHRYKEDIALFAEMGFKAFRTSIAWTRIFPNGDETEPNEEGLEFYDRLFDELLKYNIEPVVTISHYEMPLGLIKKYGGWKNRKVIDCYEHYAKTVFTRYKEKVKYWMTFNEINMVLHAPFTGGGLVFEEGENKLNAMYQAAHHLFVASALAVKAGHDIIPDAKIGCMIAATTTYPMTPKPEDVLAAMENERRTLFFSDVQARGAYPGYMKRFFKENGITIEMAEGDEDILKENTVDYIGFSYYMSMVASTSPEDLAKTEGNLLGGVKNPYLESSEWGWQIDPKGIRITLNTLYDRYQKPLFIVENGLGAVDVVEEDGSIQDDYRINYLRDHLKEVREAIADGVDLIGYTSWGPIDLVSASTAEMKKRYGYIYVDRDNEGKGTLSRTRKKSFYWYKKVIETNGESL

SEQ ID NO: 9590 - protein, 614 aa, Bacillus licheniformis
MDYNKVSKDILQLVGGEENVQSVIHCMTRLRFNLYDNAKADRAKLESLPAVMGTNISGQQFQIIIGNDVPKVYKAIIANSGLSDEKAGEQQASKKKNVLSAIFDVISGVFTPILPAIAGAGMIKGIIAIAVTFGWMSETSQVHTILSAIGDGAFYFLPILLAVSAARKFGSNPYVAAAIGAAILHPDLTALLGSGKSISFVGLPVTAATYSSTVIPILLAIWIASYVEKWIDKVTPTSLKMIFVPTLTLLVVVPVTLITVGPLGAIAGNYLSIGVNGLFENAGLITMILLAGTFSLIVMTGMHYAFIPVMFNNITQNGYDYLIPAMFLANMGQAGASFAVFLRSRNKKFKSLSLTTSITALMGITEPAMYGVNMRLKKPFVSALLGAAVGGAFYGITGVAAYIIGGNVGLPGITTFIGPTFIQAMIGIVIAFFAATAFAFVLGFEDIPSDEAAEQGAAPSEAGAGEIIQSPLKGEVKALSEVDDATFSGEVMGKGVAIEPEEGKVVSPVSGTITTVFQTKHALGITSDNGAEIIIHIGIDTVKLNGEHFTVHVNKGDAVKPGDELVSFDMDAIKDAGYQLITPVIITNTDRYQSIKPLKSDESVDIEEALIALA

SEQ ID NO: 9591 - protein, 180 aa, Bacillus licheniformis
LQNKAADRLILLGISLHSIYWLFILFLFFHFKHQLDAYAVWNPNVTDGYMEAGTFVAALKLMLYSGTLFNLGLLFILGLLIVILAQSIIFIALEIAAYVKIKKDPFSPWGSFILAMGIKNIFTNLSGIPFMAAGFILHKQQEPKEAVVEPAARRKARRNPALLMKKAAKARKRRNEGIKS

SEQ ID NO: 9592 - protein, 329 aa, Bacillus licheniformis
MCTSITLTTAGREHLLARTMDFDFELNGEVLLHPRRYKWKSEADGSEHAGRYAFIGMGRRLKNALFADGVNEKGLSCAALYFPGYAVYENEAKEQSRNLAPHEFVTWVLSECGDLEDVKKAAVSLNIVEREVSLLSTVTPLHWLLTDRSGASVVVEPTADGIQIHDNPVGVLTNSPDFPWHLTNLRNFIGLQPGQFAAKKMGGLTLSAFGQGSGLSGLPGDFTPPSRFVRAAFLKEHMKPVSDETEGVSAAFHVLSNMNIPKGVVMTDQGEDDYTQYTAVMCSETCSYYFHHYQNRQIQKVCLLQEDLDSNELKAFQPKQEETVHSLQS

SEQ ID NO: 9593 - protein, 39 aa, Bacillus licheniformis
MIILNLKKKEKLLNEFMCRDENPAFFYNPFHFDESFPIR

SEQ ID NO: 9594 - protein, 127 aa, Bacillus licheniformis
MSLILLIIIACIVKFGSNFVLDKFIFPSIKYMSKESFKKFRKFVEQKNTLLIYKKTLRASEYFFILLMIIFIAVSLFCVLSPSNSLLNFLFFGLLAFFLFCTIFIGDFNLNIKKELEKKSKRIREFN

SEQ ID NO: 9595 - protein, 337 aa, Bacillus licheniformis
MGFKRSFKIMPGVKLNINKKSVGMTLGGKNGRITYNTSGKVTTSAKTPGTGLSYSSSKSISSSQKQSHLNNNNYSNNLELNAYLNHLTSFHTRLTSRQINWEEIKKESPPEINVAQLKSDLNNYKPNFFERILRLDKTKIEKLNKEITDAETKYKKEYDEWAKQQKFVKIIDDKNSVAYSEILEDIIKIEDTIGKIKEIISNENSEVLLNLLVDTSILPNQEEYISSAGNLLTKKLTKTKYYQNQLNFIASLSIGLAKVIFQIIPVETVSINVLEKRIDTVDGHEKTMTIFGVKFKKEQFMALNINYIKPIDTLQLFETSLDFKKTKGLQPVEGIHL

SEQ ID NO: 9596 - protein, 475 aa, Bacillus licheniformis
MNMRKCFIQVLALLFIIAACFAPNQASAQTQKPVFSEVTVHDPSIIKANGTYYVFGSHLASAKSTDLMNWTQISSSVHDGNPLIPNVYEELKETFEWAESDTLWAPDVTQLEDGKFYMYYNACRGDSPRSALGLAVADDIEGPYKNKGIFLKSGMDGISNDGTPYDATKHPNVVDPHTFFDQNGKLWMVYGSYSGGIFILEMDKKTGFPLPGQGYGKKLIGGNHSRIEGAYILYHPETQYYYLYMSFGGLAADGGYNIRVARSKNPDGPYYDAEGHAMIDVRGKEGTLFDDRSIEPYGVKLMGNFSFNNKNGYVSPGHNSAFYDEKSGKSYLIFHTRFPGRGEEHEVRVHQLLMNKQGWPVVAPHRYAGEKLEKVKKSDVIGDYELVRHGKDISADIKESKEIRLNQNGKITGAVAGTWKNTGHNKIELKIDGKTYDGVFLRQRDAASERKVMTFSALSREGDAVWGSSLKRAEF

SEQ ID NO: 9597 - protein, 44 aa, Bacillus licheniformis
LDETLSHIHLFSSLLKRFHFLTIHHMLLIQGLLRAKKLPTKSAA

SEQ ID NO: 9598 - protein, 481 aa, Bacillus licheniformis
MSKASFRDYALSGDITKALDHLGYKEPTAVQSEVIPAVLKKRDVVVKSRTGSGKTAAFGIPLCELTEWEENKPQALVLTPTRELAAQVKEDLTNIGRYKRIKAAAVYGKSSFERQKTELKQKCHIVVGPPGRVLDHIEKGTLPLEKLKYLVIDEADEMLNMGFIDQVGAIIRHLPEERLTMLFSATFPEDVEHLSLQYMKDPLKIEIKAGGTTTAVIEHQLIIVNENDPFSLLVDLFIVENPDSCIVFCRTQEQVNELQRRLSVLGYPCEKIHGGMPQEDRFAVMNRFRRGAFRYLIATDVAARGIDIENITHVINYELPLDQESYVHRTGRTGRAGSRGKAITLASAREKRMIADIEDYIGFPIPIIEAPSKEEIARAKAAFLKKINAKPDLKKDKSESLNKEIMRLYFNGGKKKKLRAVDFVGTIAKIDGVSAEDIGIITIQEQGSFVEILNGKGPLVLDAMKNTTVKGKLLKVHKARK

SEQ ID NO: 9599 - protein, 200 aa, Bacillus licheniformis
MFSFKKSRFFWLRSNVILILLTALLLLNKPYWEKNANVMFFMFVCTAELFIILLALVYGFQTKKTIARPPSRAIRKTNIPIGIFVFSIFSLFFGFAMSGDIPYPNSALIIYLTINMVFAFVSLFVPTLIIKLYEVNVYDESNGLITDFFRYVAILVSSLNYEVQIVLARLPFVLQRLLGVIFIAVLLWELTMIGLIFENN

SEQ ID NO: 9600 - protein, 259 aa, Bacillus licheniformis
MLDSKIILTTNELVAAFLLCRYEKAAEDIINDQQLIQDEKDIEPFSIQAENLLKQRGYWADDTESNLQKGLENLIHLLIQSNRKVRCIHRKRVLIVHHVQKDELIVQEIENQNHSFSILRSRESFLEMLKTFYHSYTDKKPEHEIFEMDEDSFDEFHEVEADVIKRMAEDPKTHPTISQFSFDFLANNQELDNISFVESDYIQNQTRLDQVAFLLRSDNFIWHLDYENIKKTGSLYLLPVAVDEYFGKIVDTMNEFYDL

SEQ ID NO: 9601 - protein, 530 aa, Bacillus licheniformis
LKVLDVSEVIDAIDQLIKEKKQEEKEINAIRESVQKIAELDDALKGEGGNAIKEHFSVLHLPVLLYFQHFIDQYIQNLKDIKAKIRTYESTEGFVKEEFLTHDVKKGLTELKRQTNDTVDSINDEFDKISHLIGGGSISLASFNEHISEAKKHVNNTVSDLKELDRDANSILKQSSNSIAQLSKLTEKVNTWSKGGAILSKKTIKEVENYFSETDVVKQMIDEAVDLAEKQDDPTMMGRIAEWLDLIGTGNGALAVTKGVIAVNVLATKMLELEKDGKGNFRVKASPKWTQGANGKYDSKVAQFVYNILKKGDPNSSKPIKKWLGKFQNKPSGLLRKIVGLGPNTTRISYKKILESQSFLKHKPEELKSYKTKVDVKGTVGKFKDEASITKLAKKIPYAGTIFSLTTNGAEFFSDDNKDKSWFEKFGRFSAGIGMDAGVGALTASGAGLGSLVCPGPGTLIGGAIGAGIGITGSIIAGDQVKEWGEDAAGWIEDKGKEAGEWLSQKASETTDTISDGLSGAKEFVTSWFR

SEQ ID NO: 9602 - protein, 89 aa, Bacillus licheniformis
MAEIKVKAEEVKTAFSNLQTKISALSISGSKADIANSSMDVVNKIKKIEKEYEQLLKKYKEALSSVEKDAWSNIKVLIDTDKNISQKMK

SEQ ID NO: 9603 - protein, 130 aa, Bacillus licheniformis
MSNHAAKISSLEKDISSLSHNIKDTQSKIAELKKAKTAITGELHTLSNNATLINQPDITSHIWNGRHTNQFINIRSNIAHSYQNIQRETDGLISHIEQEIENLEMQISNMEMFLSIQKQQLTDIKKQVNH

SEQ ID NO: 9604 - protein, 433 aa, Bacillus licheniformis
MRMVDIITKKQNGEELTTEEIQFFIKGYTDGSIPDYQASALAMAIYFQDMTDRERADLTMAMVNSGETIDLSAIEGIKVDKHSTGGVGDTTTLVLAPLVAALDVPVAKMSGRGLGHTGGTIDKLEAIKGFHVELSKDEFIELVNRDKVAVIGQSGNLTPADKKLYALRDVTGTVNSIPLIASSIMSKKIAAGADAIVLDVKTGAGAFMKTDEDAVNLAKAMVRIGNNVGRQTMAVISDMSQPLGFAIGNALEVKEAIDTLKGEGPEDLTELVLTLGSQMVVLAKKAETLDEAREKLIDVMKNGKALQKFKDFLQNQGGDSSVADNPEKLPQAAYKIDVPAKEAGVVSEIVADQIGVAAMLLGAGRATKEDKIDLAVGIMLRKKVGDAVEKGEPLVTLYANRENVDDVIAKVYDNIQIAETAEAPKLVHTVITE

SEQ ID NO: 9605 - protein, 393 aa, Bacillus licheniformis
MKYLIGLIGLFVVLGLAWLVSSGKKRVKYRPVIVMIVLQFALGYILLNTGVGNYLVGGFAKGFGYLLEYAAEGVNFVFGGLVNVNESTFFISVLLPIVFISALIGILQYWRILPFIIKYIGLALSKINGMGKLESYNAVASAILGQSEVFISLKKQLGLLPKHRLYTLCASAMSTVSMSIVGAYMTMLKPEYVVTALVLNLFGGFIIASIINPYEVDREHDMVEVQEEEKQSFFEMLGEYIMDGFKVAVVVAAMLIGFVAIIAMINGIFSAALGISFQELLGFIFAPFAFLMGIPWHEAVNAGSIMATKMVSNEFVAMQSLAQGSFHFSGRTEAIVSVFLVSFANFSSIGIIAGAVKGLNEKQGNVVARFGLKLLYGATLVSFLTATVVGLIY

SEQ ID NO: 9606 - protein, 223 aa, Bacillus licheniformis
MTIANLIDHTALKPHTQKSEIKKLIEEAKAYQFASVCVNPTWVEFAAEELKGTEIDVCTVIGFPLGANTTETKAFETKDAIAKGATEVDMVINIAALKDGNDDFVEADIRAVVEAAKGKALVKVIIETCLLTDEEKERACRLAVAAGADFVKTSTGFSTGGATAEDIALMRKTVGPDIGVKASGGIRTKEDVETMISNGATRIGASAGVSIVSGAEGKNEDNY

SEQ ID NO: 9607 - protein, 312 aa, Bacillus licheniformis
MDKEKQQLSIEAARLYYQSDYSQQQIAEQLQISRPTVSRLLQFAKEKGYVQIRVMDPFEDMDALGAMLEEKYGLLEAHVVFSPTADYTTITHYLSRFGAEYMHGAVKDGDIVGVSWGTTMYQIAQNMQPKQVKGAEVVQLKGGISHSSVNTYSSETIQLFAEAFQTMPRYLPLPVVFDNPEVKQMVEQDRHIKGIIEMGKQANIALFTVGTVRDEALLFRLGYFHEEEKALLKERGVGDICSRFFDAEGNICSDAIDSRTIGIELADLREKERSILVAGGSRKKAAIHGALKGKYANVLIIDQHTAKELLDD

SEQ ID NO: 9608 - protein, 144 aa, Bacillus licheniformis
MYIISKLERQNVKVTEIPKWGSYLRKTWENRFAASMELPERDAILVSHFLWHLFSYGMKPCFTGGQADQAFSEQPKRDCFLFYQHTDDAYILEHAEQLIAADLKGEEDAYITDKHMTWTYAVTHESAYGPYFAIQLDEKEHEPI

SEQ ID NO: 9609 - protein, 364 aa, Bacillus licheniformis
VKAPVRYIWIGMILCFLSVSLAVGCIKAEDQSDDEKNDEALQPAEHFVYRHLMSDQGLIKTGFSDQPVYLSESLGLWMEFLISKKDGEHFHEQYQHLNESFLMNNNLVSWQIQNGQASGVNALIDDLRIMVSLDQAAALWGNSEYKQTARNIGAALRKYNMNNGILTDFYDSASQSAAKDITLSYIMPDALSILKKNGVINKELESRNASILYRAPLKNGFLPKAYSTETKAYTYDHEVNLIDQLYAAWHLPPKDQKAAVLADWLKQTFQTGGKLYGRYSLDTKKPAVQYESPSVYALAILFFINQNEDKTVIKALYDRMNDFEILDSSETYYGGYMSGNDTHSFDNLLPLLAERKLLNENLIQ

SEQ ID NO: 9610 - protein, 51 aa, Bacillus licheniformis
MKISFNESHKMFAYMTGLAAALALFIHYISVQRFEPVLIICITLAIIAAGI

SEQ ID NO: 9611 - protein, 576 aa, Bacillus licheniformis
MNCKRLLLLYAAVLILSAAFYVPDSAEAKQQEHGILIVYSTLDGKESADVKILDLIAGHFSSRVAVIKDADVKASDLATKDRVIYYGQTKRKLSKKLAQLISSSKKPVIAIGFNAGQFSQFAGLTLKSKDNVYQIRSTNEEIDSSLESGVRVLDVSGLKGKALYTYKADEGKARPFGWKTGKGNVYIGLTDLLNNSLLAAKQLRQAFGETAGSTLLYLRLEDISPMSDEKLLLQAGSYLHKRNIPFILSVIPVYVNPETGDKVYMSEKPKLVKVLRKLQDMGGSVIVHGYTHTYRYSETGEGFEFWDAKADQPITSENAEEPATLLQKEQSFPNEEAYQNYLKPFRKNEETYTRQKLTNAIEDLTAEGLYPLAFEAPHYTMSEHGYQIASQYFTSLFGQVQLSDTTWKTSGAGPFVTNPAMLHGMTLYPETIGYVDQSEQNPLGKVEERISQMIDFEGGVAGAFYHPYLGMKYLPELVDQMERIPNSEWLDIKKTKQTVNTDKVEIHTSGDGTIQVKSKVSPIETFFDHHQQSPLEKALWILSLIVLLFVVMFVSYTLYLRATLKKRIFKERKSRG

SEQ ID NO: 9612 - protein, 420 aa, Bacillus licheniformis
VGNVLFLVSLSLIWVMLLYHMFLMQGGFRHYMTFERNIPKWKENVKDLPKVSVLIPAHNEEVVIRQTLKAMVNLYYPKDRLEIIVVNDNSSDRTGDIVDEFSTQYGFIKMVVTKPPHAGKGKSSALNCGFAESNGDVICVYDADNTPEKMAVYYLVLGLMNDQKAGAVVGKFRVINAAKTLLTKFINIETICFQWMAQGGRWKWFKIATIPGTNFAIRRSIIEQLGGWDDKALAEDTELTIRVYNLGYHIRFFPAAVTWEQEPETWKVWWRQRTRWARGNQYVVLKFLAQFFKLKRKRIIFDLFYFFFTYFLFFFGVIMSNAIFVINLFYNLHLSFGFLSIILWVLAFFLFMTEVMITLSIEKTEMNRQNFFIVFLMYFTYSQAWIVLVIYSLFVEIKHRLFKQEVTWYKTERYNQKKSG

SEQ ID NO: 9613 - protein, 708 aa, Bacillus licheniformis
LKYIIICLASFLLITATGQAAAAKDVTVDGSILGENSREQAKQQVLTNDLLTLYGAKDSAELTYQIPAGASSTHQQLTLKYEASDLLISPSSLTAVIDGEPVKTVKLEGNDGKKTLKLSLNKSQSSPGFHSLSLKFYGVVHEGVCVRQDSSGNWIKIYPDSRLNIGEKNESKGAALEHYPYPFAQSGSSVEKTAIVIPDHPSSAEIEAAVKTEAYLKTVDNSISTKILGESDLAKIDRPTIVIGVHHHWSGKVKKLLKQAKLEAKEDKLLLAKRMLKAKDKQQPVLFAAAASDDVLSEKISVITDKTYAAQLSGDTLAIGKLQQHSKRGGSKLTLEDFGAGDLTIGSGQTSSEHFYYPAPALLDKNQPAKLSLAMKKSKTIQKQAGQSDLAAEQAELKVMINGQPHSVGLDDIGKEDKNGFYHVSLKVDPKLLQKSRYIDIQFAASGLKENNPCYAVNEDKWIFIDKQSALSYHVIDTSASADFQAWPLPYAGDHNNKTLMILPDNADQSKIDELSLVVGSFGSEARQAFTVKTSSEVKPDDVKGRNVIFIGSVDQFSLLKEKTAELAVPTAKNGTFDVSSFQMLNETTKQVAFTQTSLWDSNYSMAVFAPFKGQGTAVTKEMINFLNSNDFAATVVNETDSHQLFTNHQQLTAKSAETKTDDKQESNQQHVLYIAILIVIIAAAVILILTTARRRKRKANAGGGIDE

SEQ ID NO: 9614 - protein, 429 aa, Bacillus licheniformis
VKPSLSKIGEKMIEKTGVRAVMSDIQEVLAGGERSYINLSAGNPMILPGVSAMWKSALADLLDDDRFSSVIGQYGSSYGTDELIASVVRFFSERYSAGIRKENVLITAGSQQLFFLAINSFCGMGSGSVMKKALIPMLPDYSGYSGAALEREMIEGIPPLISKLDDHTFRYELDRKGFLERMRTDPCIGAVLLSRPNNPCGNILPKEDVAFISDACREANVPLFIDSAYAPPFPAIHFIDMEPIFNEQIIHCMSLSKAGLPGERIGIAIGPSRYIQAMEAFQSNAAIHSSRLGQYMAASVLNDGRLADVSLNEVRPYYRNKFMLLKETLLCKMPEDIKWYLHQGEGSLFGWLWFEDLPVTDAALYEYMKADGVIIVPGSSFFHRQSRRLAHSHQCIRISLTAADEDIIRGIDVLAKIAKGVYEKQVEYL

SEQ ID NO: 9615 - protein, 412 aa, Bacillus licheniformis
MTTLTGDIVNMVNEQIVPNIHELQTYQNDKGQITEHHERAEQLLLQLIEDAGAIYEAVHLTAAKEAFKEDVLDWISRGLGETPYFDRLLTAYRAPHDQETTFFAAPIVTPNGPHAKGCYFEAFLAVREEPAMMRPIEEDLPHPENGCQSLKLLAGTKGFTEEKCIVFFPENVKTKEKITSQTFAIFYFNKFYHIYHEDTLKRARAIFEHAPFKSAQLSPDRTYEARVLWGYLHDYFHHCGKKPFHLHIQAKMNFFAGILEEVKVDCQAILTLWERQYDGWEEIIEFVLYERLLRYPSQHNATRNFDSGTGYFLFSWMIENGRSIQKGEEKRVSLDLPRCMDDLRKLVAEIEQLEEIEDDTAYKEAAERYVRQYLPPGREGERFSVPEQYFIDEINKKIETARLRFERERLEA

SEQ ID NO: 9616 - protein, 188 aa, Bacillus licheniformis
MISTKVHKEQAVMIVHTLGPKGTNCEKAGLLWLKNKGVRGEVRLYETLEEALLHVKSTENSVLLGCAVYPFLHQIVFENLADLKIIDSFVMPTYNMVFAAKQHTMASDIQIVASHPAPAHLAKLFSSQVQFVTSNAQAALACASNAADGCITTIKAADEHRLKVIKDFGEVPMCFTIHGLKSIEGGSR

SEQ ID NO: 9617 - protein, 425 aa, Bacillus licheniformis
LTKRNKNLAIICQNKHLPFIFEEAERLGLKVTFFYNSAEDFPGNLPAVERCVPLPLFEDEEAAMDVVRQTFVEFPFDGMMTLFEPALPFTAKAAEALNLPGLPFTTMENCRNKNKTRSILQQNGLNTPVFHEFHTLADLENRKLSYPLVVKPVNGFSSQGVVRVDDRKELEEAVRKVEAVNQRDLNRFVHGKTGIVAEQFIDGPEFAIETLSIQGNVHVLSIGYKGNSKGPFFEEGVYIAPAQLKEETRLAIVKEVTGAVSALGIHQGPAHTELRLDKDGTPYVIEVGARIGGSGVSHYIVKESTGINFMQLVLQNALKPLESSEFEGEIRPVRTAGNYIIPVQGSGTFEKIDGLEEVKQRQEVKRVFQFMRRGAKILPYPHFSGYPGFILTSHHSYEECEAFYRELDDELHIIYQNNLTGTIGG

SEQ ID NO: 9618 - protein, 312 aa, Bacillus licheniformis
MLTNVLKYRVHILFIVLCLIGGTTWAFQKAGLSDSLPFWSAGMRFMIASILIAAFLLARRQFVLSKELLVLSFLNGIMYFSVPFGSVYWASLYLPSGLVSILAASISVFALMINRLVKGTPATKLQKWGICLALLGITIVFGNQLLIKVDVIEIVAMIVILCAMFGSAFIQIKVQQRIRSLPILSFNSLSMLSGGAVLLISSLIFESGTRTFSGVSLYALLYLAVVGSILGFWINIYLLKKWHISKATSHLFISPVIALYIGFLFLDEKLNANIYLGTLFVIFGVMFINLKKEERIAKIDETKQKLGHHLSK

SEQ ID NO: 9619 - protein, 292 aa, Bacillus licheniformis
VAFVSMKELLQEAKEHHYAIGQFNINGLQWTKAILEAAEEERSPVIAAASDRLIDYLGGFKTVSAMVAALIEEMSISVPVVLHLDHGKSPERCKQAIDAGFSSVMIDGSHSPIDENIAMTKEVVSYAGVRNVSVEAEVGTVGGMEDGLIGGVQYADIGECERIVKETGIDALAAALGSVHGKYQGEPNLGFKEMEEISRVTDIPLVLHGASGIPADQIARTIRLGHAKININTECMVAWTEKTRSIFKDNPDLYEPRAYMTPGISAVKETVKHKMREFGTSGKAVCTQKIEI

SEQ ID NO: 9620 - protein, 278 aa, Bacillus licheniformis
MKLCFNEATTLENSNLAKDLEYCEKHGYDYIEIRTMDKLPEYLKDHALSELAEYFQTHHIKPLALNALVFFNNRDEKGHREIIEEFKGMMETCKMLGVKYVVAVPLVTEQKILKEDIKASSVEVLTELSDIAEPYGVKIAVEFVGHPECTVNTFSQAYDIVMTVNRDNVGLVFDSFHFHAMGSSLEDLKKADGKKIFIYHIDDTEDFPIGFLRDEDRVWPGQGAIDLDAHLSTLKDIGFSDVVSVELFRPEYYKLSAEETIRTAKETTVEVVSKYFKI

SEQ ID NO: 9621 - protein, 288 aa, Bacillus licheniformis
MKLALDPSMYRDDLTLEETVYKTAELGYEYIELSPREDFCPFYKYPKVDSAKIKQLKRLLRDTGVKLSSLLPLYHWAGPDEDRRQAAVRNWKRAIEIAVELEVDLMNSEFSGSKYDPLTSEEKFIKSMDELLPIFEKEGIKLNLQAHPYDFIETHKGALDMIRALDKDWINLVYSTAHTFFYDDGKGDIETMFDEAGDRLTHVLFADTYNHKAAHGLRYIVNPPDAKVTVHQHLDIGQGEVDFDTIFRKLREMKFDGIATNAVFAWVDERADESSRFMLEKLKQELLG

SEQ ID NO: 9622 - protein, 344 aa, Bacillus licheniformis
MKLRIGVIGTGAIGKEHINRITNKLAGGEIVAVTDVNQEAAQQVVTDYSLNAKVYPDDDSLIAAENVDAVLVTSWGPAHESSVLKAIKANKFVFCEKPLATTAEGCMRIVNEEVKAGKRLVQVGFMRRYDSGYVQLKEAIDNRVIGEPLMIHCAHRNPVVGDNYTTDMAVVDTLVHEIDALHWLINDDYESVQVIYPKKSKNALPHLRDPQIVIIETKGGVVINAEIYVNCKYGYDIQCEIVGEDGIVKLPEPPSISLRKDGKFSTDILMDWQRRFVDAYDVEIQDFIDSIQQKGEVSGPTAWDGYIAAVTTDACVKAQESGQKEPVALQEKPEFYQTFTTVKK

SEQ ID NO: 9623 - protein, 434 aa, Bacillus licheniformis
LSNGSAAVSPFNKRTVAAALANYIDAGSIVAGSAGLSLWVSYLKLSDTQIGLLGAFSANAISAAIGALLGGFLADKIGRKAVYTNSMLVYALGICLVLFGTSFPFLLSGYIIIGLSVGADITASWTIIAENAPKKNRARHCGVAQVAWAAGAVVVLLLSVLLGDLGLLGNKIVFGHLLVIALITYVLRKRLPESDAWQDQSEMAQAVRKPKTSYLDLLQPKYLKSILFLMGVYLVWNLAAGVMGFFMPYIYQQVGDVSATMANILQMGLFIFTGLGVAFIFMPFADKYRKTVFGISAFAAVIGWSLFLLPAEGMPILILFIVMIGINNGAGQQANYQLWASEIFPTEYRASAQGLMFFLVRISIGAWSLFVPMIISNFGIAFMAAILLGCVTASMLIGLFFAPNTSGKSLEQIQEELYGTPPAQAGQVQTRKIM

SEQ ID NO: 9624 - protein, 300 aa, Bacillus licheniformis
MGKTQILWGIAPIGWRNDDIPEIGAGNTLQHLLSDIVVAGFQGTEVGGFFPEPAILNKELELRNLRIAGKWFSSYIIRDGIEEAAKEFAAHCQYLKDVHADVAVVSEQTYSVQGLDKNVFKEKPYFTDEEWQRLFEGLNHLGEIAGRYGLKLVYHHHLGTGVQTEEEVDRLMAGTDPALVHLLYDTGHAYISDGNYMNILEKHIDRIRHVHFKDARLKIMEKCKREGNSFQQAFLQGMFTVPGDGCIDFREVYQTLLKHGYSGWIVVEAEQDPDVANPLEYALIARKYIDRHLLNVPATN

SEQ ID NO: 9625 - protein, 637 aa, Bacillus licheniformis
VGKKIRLTTAQALIKFLNQQYIHVDGEETPFVEGIFTIFGHGNVVGIGQALEQDAGHLKVFQGKNEQGMAHAAMAYSKQMQRRKIYAVSTSVGPGAANLVAAAGTALANNIPVLLIPADTFATRQPDPVLQQVEQEYSAAITTNDALKPVSRYWDRITRPEQLMSSLIRAFEVMTDPAKAGPATICISQDVEGEAYDFDESFFEKRVHYVDRKEPSERELKGAAELIKSSKKPLILVGGGAKYSGARDELIAMSEAYNIPLVETQAGKSTVEADFANNLGGMGITGTLAANKAARGADLIIGIGTRYTDFATSSKTAFDFDNAKFLNINVSRMQAYKLDAFQVVADAKVTLGKLHGLLEGYKSEFGSTIKELKDEWLAERDRLSKVTFKRENFTPEIKDHFSQDILNEYADVLQTELPQTTALLAINETVDPDSVVICSAGSLPGDLQRLWHSNVPNTYHLEYGYSCMGYEVSGTLGLKLAHPDREVYSLVGDGSFLMLHSELITAIQYNKKINVLLFDNSGFGCINNLQMDHGSGSYYCEFRTADNQILNVDYAKVAEGYGAKTYKANTIEELKAALEDAKKQDVSTLIEMKVLPKTMTDGYDSWWHVGVAEVSEQESVQKAYKAKEKMLESAKQY

SEQ ID NO: 9626 - protein, 325 aa, Bacillus licheniformis
MKYTFNEEKEFDIVAIGRACIDLNAVEYNRPMEQTMTFSKYVGGSPANIAIGSSKLGLKTGFIGKIPDDQHGRFIETYMRNTGVDTSQMAVDKDGHKAGLAFTEILSPEECSILMYRDDVADLYLAPSEVNEDYIAKSKMLLVSGTALAKSPSREAVLKAVQLAKKHQVKVVFELDYRPYTWTSAEETAVYYTLVAEQSDIVIGTRDEFDVMENKSGGSNEESVQHLFAHSADLVVIKHGVEGSYAYSKSGDVFRAKAYKTKVLKTFGAGDSYASAFLYGLVSGKDIETALKYGSASASIVVSKHSSSEAMPTVAEIEELIAAQS

SEQ ID NO: 9627 - protein, 271 aa, Bacillus licheniformis
MSHLLRKPQANELSQGVKLVHEVKKSNSDLSYVEFKVLDLAPGSSYEESLSKQECCIVALTGKITATDHEQTFENIGTRESVFERKPTDSVYVSNDRKFGITAVTEARVALCYSPSENQLPTKLIKAEDNGIENRGKFSNKRTVHNILPDSDPSANSLLVVEVYTESGNWSSYPPHKHDQDNLPEESFLEETYYHELDPQQGFVFQRVYTDDGSIDETMTVENGNVVIVPAGYHPVGVPDGYTSYYLNVMAGPTRKWKFHNDPDHEWILER

SEQ ID NO: 9628 - protein, 487 aa, Bacillus licheniformis
MAEIRKLRNYINGEWVESKTDKYEDVVNPATKEVLCQVPISTREDIEYAAQTAAEAFKTWSKVAVPRRARILFNFQQLLTQHKEELAHLITIENGKNTKEALGEVGRGIENVEFAAGAPSLMMGDSLATIATDVEAANYRYPIGVVGGIAPFNFPMMVPCWMFPMAIALGNTFILKPSERTPLLTEKLVELFEKAGLPKGVFNVVYGAHDVVNGILEHPEIKAISFVGSKPVGEYVYKKGSENLKRVQSLTGAKNHTIVLNDANLEDTVTNIIGAAFGSAGERCMACAVVTVEEGIADEFMEKLVQKASEVKIGNGLDDGVFLGPVIREDNKKRTLGYIQKGIEEGARLVCDGRENVTDEGYFVGPTIFDNVTTDMTIWKDEIFAPVLSVIRVKNLKEAVEIANQSEFANGACLFTSNSNAIRYFRENIDAGMLGINLGVPAPMAFFPFSGWKSSFFGTLHANGKDSVDFYTRKKVVTARYPAPDFN

SEQ ID NO: 9629 - protein, 42 aa, Bacillus licheniformis
LNIKHLLVQMGQVSTIMYECRTALHCTTDFRKKQELNAYKRN

SEQ ID NO: 9630 - protein, 254 aa, Bacillus licheniformis
MKLMRIKEMEDYILTNGTVSLDELCQVFNVSKNTVRRDINKLTEKGVIKKVYGGVTAIEKTALIPFENRTIQNKDAKTKIARYASRFIEDHDLIFIDSGTTTRSILETLDPNKNVTVLTNSLDIINAAAAMQNINLIIIGSNYKRKTQSFVGMDDPGTLDKYNINKAFMSATGATLTHGLTNSDLLEYEIKKKISEKAKQVYLLADHSKFGKSTLLTYAPFDRLHAIVTSQALDEEYHVYCKDRKIEIHLAKHV

SEQ ID NO: 9631 - protein, 311 aa, Bacillus licheniformis
MKKVKVGKSDLHVFPIGLGTNAVGGHNLYPNLNEETGKELVREAIRNGVTFLDTAYIYGIGRSEELIGEVLKEFNREDVVIATKAAHKKEGDDFVFDNSPAFLKKSVEESLKRLQTDYIDLFYIHFPDENTPKDEAVQALHELKQEGKIRAIGVSNFSLEQLKEANKDGLVDVLQGEYNLLNREAETTFFPYTQEHNISFVPYFPLVSGLLAGKYSEDTTFPEGDLRREMENFQGERFKENIRKVNQLAPIAEKHNVDIAHIVLAWYLARPEIDVLIPGAKRADQLIDNLKTAEVNLSQEDIDFIDRLFAR

SEQ ID NO: 9632 - protein, 297 aa, Bacillus licheniformis
MKRLVRSIFLITAAIAAFGFGFSGHAEAASHSQPQLNPNKLLNVAHRGASGHAPEHTLLAYKLGQKMKGDYIEIDLQMTKDGHLVAMHDETLDRTTNGTGFVKDYTLKEIKELDAGSWFNEAYPERAKPEYAGLKVPTLEEIIQTFGRSARYYIETKSPEDYDHMEEKLLDILKQYKLTGADIHSSKVIIQSFSPESLKIIHNANPNIPLVQLLWYDKPAAITDAELKQYQSYSVGLGMNFDRIGRAYVQKIRRTGMLVHPYTVNKKEDMKRLLDWGATGMFTNFPDRLRDVLREKK

SEQ ID NO: 9633 - protein, 452 aa, Bacillus licheniformis
MLKLFKPAPPIERLPEDQIDSEYKKFRLQVFLGIFIGYAAYYLIRKNFSLAMPYLIEEGFSKSALGFALSALSISYGLSKFVMATISDRSNPRMFLPAGLILSAVISLLMGFVPFFTSSIAIMFIMLFLNGWFQGMGWPPSGRVLVHWFSVSERGNKTAIWNVAHNVGGGLMAPIAVAGVAIFSGITGSATGYEGVFILPALVAIAVAVISYWLIRDTPQSVGLPPIEEYRNDYSSKSKKTFEKELSTKEILFKHVLNNKWVWAIALANIFVYFVRYGVLDWAPTYLSEEKGFDMSKSSVAYFLYEWAGIPGTLLCGWISDKWFKGRRGPAGFVFMAGVLIAVLVYWFNPAGNPMIDMASLIAIGFLIYGPVMLIGLQALDFVPKKAAGTAAGLTGLFGYLGGTLTANALMGVIVDASGWNAGFTLLTASCAIAALIFAMTWNVRGQEVVKH

SEQ ID NO: 9634 - protein, 626 aa, Bacillus licheniformis
MAKREFKAESKRLLDIMINSIYSQKEVFLRELISNASDAIDKIYYKALTDDSLTFNKDDYYIKISADKENRTLTIADTGIGMTKEELEEHLGTIAKSGSLAFKQENELKDGHDIIGQFGVGFYAAFMVADTVTVITKAHGSDEAHQWESAGADGYTIEPAAKESAGTDVILKLKENTDDENYDEYLDVHRLKAIIKTYSDFIRYPIKMDVAVNKPKEGAENEFEEVQEEQTVNSMVPIWRKNKSELKDEDYEAFYKEKHYGFDKPLAHIHTSVDGAVRYHAILFIPENIPFNYYTKEFEKGLELYSNGVLIMEKCPDLLPDHFSFVKGMVDSEDLSLNISREMLQHDRQLKLIAKNISKKIKNELKSLLKNDREKYESFYQSFGRQLKFGVYNDFGAHKDLLKDLLLFYSSKEKKLVTLEEYVSRMPEDQKYIYYASGDSYDRIEKLPQTELVSEKGYEILYFTEDIDEFAIKMLANYQEKEFKSVSSGDLGIENDDEQNQSDGDDSQYKDLFEEMKKTLDGKVKSVRASKRLKTHSVCLAADGEVTIEMEKILNAMPDNQHVKADKVLEINTNHEVFKTLQNAFDNDKDKFKLYTGLLYNQALLIEGLPIEDPVEFTNDICKVMA

SEQ ID NO: 9635 - protein, 511 aa, Bacillus licheniformis
MSIVHVTNLTHIYGDRMIFQDAGFRLLKGEHAGLVGANGAGKSTLLRILTGSLLPDHGNIEWQPNIRVGFLEQHAKLTEGTTILQYMEKAYGRLFEIEKEMNGLAEKMADAGDNLEAVLKRYGELQAELEASGFYQIGTKIEDAAQGLGLAEIGLDQDVTALSGGQRTKLLLAKLLLEEPDVLLLDEPTNYLDAAHIEWLTGYLKNYEHAFLVISHDERFLNEITTVTFHLEHHVIKRYSGNYQYFLKEYAQIRAQAEAAYAKQNREIKKLEAFIDRNRVRKAKQAKSREKALRKIKRIEKPTDSYVPSFAFKTGRNPAMTVLKTENLEAGYTVPLFKPLSLTVRRGDKIAIIGENGAGKSTLIKTLLGDLKPLSGIVTAGQHLQAAYFRQESPASHDTPLEKLRAFYPDLPEKDIRQTLAVSGLTPKHISQPLFTLSGGEQAKVRLAELMLSNSNLLVLDEPTNHLDASAKHALKQALCDYKGTILLVSHEPAFYEDWVTHIWQIEAWRR

SEQ ID NO: 9636 - protein, 270 aa, Bacillus licheniformis
MYKLIAIDMDGTLLNDLHEVTEEVRNALHAAKKQGVKIVLCTGRPLGGVSRYLEELNLNEDGDYVIAYNGALVQNTHTQEVVSELTLGYDDVKSLYELSQKLDTPMHFFDSAYLYTPNREISPYTVYESYVTKVPLRFRTIEEIPQDLLAPKAMYIDEPEKLDRTIAAIPEDVKERYTMVKSSPFFYEILHPAASKGNAVQQLADILGIAQEEVMCIGDNGNDMSMIEWAGCGVAMGNAIPEVKASADYETRTNNENGVAHAIRELVLSK

SEQ ID NO: 9637 - protein, 349 aa, Bacillus licheniformis
MPRQVTSIAIPAVLDISEGVLGRLDEILRKHQFDKAIMFFDDFSYQQYEHSLKTAFQHVKVEAVLLPSNLDIQELLKRAFSIGNCDVIIAMGGGYVVDCGKYIAFSKRTPFISIPTSASNDGFASSNCSLQVEGKKTTVPARVPYGIIADLSIIQKAPDCFILAGIGDLMSNITALYDWEFEERHGVGDVNAFASMLSKKAVNSFVRTPMQDIKQPIFLKELVSSLTMGGIATEISGNSAPISGSEHLISHALDKISKKPQMHGIQVGVATYIMAHVQDHRAERIEKVFTRTGFFQYVKTLNLNKDEFREAINLSHTVKPNRYTYLHEAGYREKALRILDEDPILQEIF

SEQ ID NO: 9638 - protein, 216 aa, Bacillus licheniformis
MKKWAFVSDFDGTISKQDFYWMVIDKYFPEGRELFKKWKSGELKDIEFLGTVFASINQSEQKIIDDIHSIPIDEYVPDFIQHVQKSGGDFYILSAGTDYYIHYILKKYGITDVEVYSNKGFFKEDNVHMDIDENHWHYSERYGIDKSKVIQKLKEEYETVYFAGDSEPDSHPAKFADVTFAKDALQDLLRQQGVPFVAVETFEDIEQYLKEKGRIV

SEQ ID NO: 9639 - protein, 153 aa, Bacillus licheniformis
MAETNPVIKKLQFKDNGQPVLIVNPPEAYSGVIAEFQGPVHHHAESDQYDFVQVFAATNAKLQALAKEAERHLAEDGLFWLCYPKKSSKVYKGSDCSRDTVAGLLADQGYEPVRQIAIDEDWSALRFRKAENIKTMKRKFAVTEKGKQRTDQE

SEQ ID NO: 9640 - protein, 319 aa, Bacillus licheniformis
VKKNLLIIGLVMLLCIVVSACGSGNASNGSKEKAAEETTRTYQSTRGSVKIPTHPKRIVTDFYAGELFTVGANVVGSGSWSFSNPFLKDRMKDVTDLGDPINVEKVMKLKPDLIVVMNDDNYDKLSKIAPTVVIPYNTAKNVQETVKMFGDIAGAKEEAEQFLADFDRKSKAARKKIAQVVDKNATFGIYENTEKGQFWVFNDNGGRGGQAVYNALGLKAPEKIQKDIFKKGEIKELSLEVVPEYAADYMFVTDYNPNGDSKTLDKLKQSSIWKNLDAVKNNRVFINDFDTFYPYDPISVSKQVDLITEMLVKREKENK

SEQ ID NO: 9641 - protein, 133 aa, Bacillus licheniformis
MNENKKAEQERKIGFEGFVLLLSLIFIFIFITTAYEIPSNLLLIILFFIGSGYYSIRLVSKGLLRKKRGLGFKAAFSAFVVWMALSFLFHDISYPFSLKGLLFQIMMFFLFYIPFYLIFQFAFRFSSIQERKQ

SEQ ID NO: 9642 - protein, 40 aa, Bacillus licheniformis
MLTIIIHKNNDLTRMPLLQPITPVSRETKNASKKYMESSV

SEQ ID NO: 9643 - protein, 122 aa, Bacillus licheniformis
MGIEKVGQIGVPVQDLERAAAFYQDVLGLSLLFQTDRMAFFECGEVRLLLSLPEKDEFAHAGSVIYFQVEDLPAVYDEIATKGVSFPIEPHVVAKIEQTETWVAFFEDTEGNTLALMSEVNI

SEQ ID NO: 9644 - protein, 52 aa, Bacillus licheniformis
MLFNITIGALIFSYAAWTLIKFVKRSRKGKCAACELNRTCQSACDDVKTKNS

SEQ ID NO: 9645 - protein, 670 aa, Bacillus licheniformis
MNSRQIALFGNPNTGKTSLFNALTGSYEYVGNWSGVTVEKKVGLLRHKQGMIVDLPGVYTLSPLSRDEGVVTDFLLNDSFSDILNIVDASQLKRNLHLTVQLLEFGHPLTIGLNMIDVAGQRGVFIDHQKMSDALGVPVIPVIARSGKGCDELSRHLLFEKEKRAEPLVINYGSAVEEAIGRIESIIPELPGVLKRWMALQYLEGNSKMKEQLEDAADSERLKEIYEETEKRLHQEHSVRSLHQHIYNERSRWIDRILSTSVQYQSERKLTLTERVDQIVTHQVLGIPIFLLFMYLMFMLTFDWFGVPLSDALDGFIGGPLTEWTASALSAMGASPFIEALILDGIIAGVGGVLVFVPQIFILFFFISVLEDSGYMARVAMVMDRLMEAIGLNGKAFIPLIIGFGCNVPGVMAARTVEQPKERLLTIMLTPFMSCSARLPVYALFAGAFFAAHQAFVVLSLYVLGIAAALVLAKFLSSSKLKEEKSFFVIELPPYRLPQARTLWRATWEKGKGFVRKAGTYIFGGSVLIWLLSYTGPGGTDVAMDDSFLAMIGGVLAPLLLPLGFGTWQAAASLLTGFLAKEVVVASMSIIYFVPEAQLQGMMAEQFTPLAAYGFMAFVLLYVPCLATVAVIKKETNSKKWMFLSIVYGLAIAYAIAFLIYQGGRLLGLS

SEQ ID NO: 9646 - protein, 75 aa, Bacillus licheniformis
MVLAELKQKERARIIDFSDVNELVQLRLIQLGMKEDDEICVKRKLPFGGPFMFESGGQCLGIRLGEAKKIRIEKL

SEQ ID NO: 9647 - protein, 362 aa, Bacillus licheniformis
LQVKEIFVIRCISCLSVVLLHAISMVLMVRADMLGDAVFRVVESFRTLLMFSTPAFIFISEFLLAHAYPGGVPEGFLKKRFKTIFIPFLFIAVLDAFMTAGLMMQQFHASVIIKKLLANIFLGNFIGYFILVIFQFYLLHMCFHSFLQKASPKWVLSISFAVTAAYLSYFTFIQPPVVQEEAPFPFSWVPFPGWLFYFCLAYYCGKNYERFLALLERYRHAVYAAAAVTGCFIVAVSYFGQDIAVTSKRPDILLYSTSIIFLCFHLFSKLKSVPKLIMMISNYSFSIYLLHAFILIFGLVILTALDSIGTVSAVLLLFFISTGAAVFISWAVNKLKYGYMFVGKIYVPKKRRMEQKVRHHAG

SEQ ID NO: 9648 - protein, 628 aa, Bacillus licheniformis
MTFRQFAFNNVIRNKRLYAAYFLSSMFTVMVFFAFAIFAFHPVMTSDSLTSGIGQHASFGLLVAGGIIFVFSFFFVLYSMSSFLQSRKKEFGVLMIQGMSMRQIRMMVFLENMLIGFFATIGGIVLGLVFAKLILLTAENVLIIDNKLDFYFPLMAMIVTLISFNGLFLFISFLVSFVLRSEKLIVLLKGNKISKGEPKASALLTLVAAVLLAGGYYTALIVKEGGVLVAMVPVTIVVIIGTYLLFTQLSVYVIRRLKKRETLFWRKTNMILFSDLSYRMKDNARTFFMVAIISTVAFSAIGTLYGFQTLVTNGIKEMNPHTFSYKPPETNKHIEKDVAFINDTLDERNIKTDKASAVLQYFDVGGNDMLIVKESDYNKFADLVGADHVKLEDGKAAAAEYEVKIGLEGDDDQQLPSSIPFANGKQLKADQTIRSKALSEPSYYIVTDKDFAQLKKPKSENRFYAWQAKEADGMALVKAGEALQKKLDYMYFGAVDYEVYNISKGYGPILFVGLFIGIVFFVSAGSFLYFRLYTDLDDDKQKFKSIAKMGLTDRELHKVLNRQIGILFFAPIAVALVHGAVALTALSHAFQYNLFKESAMVLGVFFAIQVIYYFIVRFYYTKQIKAAI

SEQ ID NO: 9649 - protein, 254 aa, Bacillus licheniformis
MLQVKQASKIYEGKIAYRALTDINLTIDKGEFVGIMGPSGSGKTTLLNMIATIDEPTTGEILISGQNPHVLKKEKLAKFRRRELGFVFQDFNLLPTLTVEENIVLPLTLDGEKVKEMKRRANELAEKLGITQIMKKRTYEISGGQAQRAAVARAMIHSPKLLLADEPTGNLDSKSSKDVMEMLESINRNEKATMMLVTHDPQAASYCNRVVFIKDGKLYSEINRGDNRQAFFQKILDTLSLLGGDANDLSSVRV

SEQ ID NO: 9650 - protein, 335 aa, Bacillus licheniformis
MKLFFKEHYLLIAVQALQFITMLSVYWLDGYQHIRPAFYAVFLGFFFLGFYLFYHYYTRRKFYKRMTSGLESLDDTFRQSNQPQSPLSEALEQLLKSQYKQYRQELKKLELGQKEHLTFMDQWVHQMKTPLSVIELTAQNLDEPESSSIREETERMKTGLNTILYMARLRTIEQDFRIKPVALADIVHEVNRENKRFYIRSQVYPKFKEIKKGITVETDEKWLFFIISQFVNNAVKYSAGKSNTVIISVYENDSEAVLEVADFGAGIPDTDQKRVFDPFFTGENGRRFRESTGMGLYLAKSAADQLGHRIELDSQEGKGTTIRLIFTATQNLTSM

SEQ ID NO: 9651 - protein, 235 aa, Bacillus licheniformis
MQKVMIVEDDPKIADLLKSHIVKYGYNVHVVKDFDRVMDEFRSTAPDLVLLDINLPSFDGYYWCRQIRQESICPVLFISARTGEMDQVMALENGGDDFITKPFHAEIVMAKIRSQLRRAYGEYAAKAEERLLEKEGLRLYPERLELTFAGQTAALTKKEADIIESLMERHPRISGREDLLAKLWDDQAYVDENTLNVNITRVRKKFQELGIEDAVETVRGAGYRLNVSWVKAGEE

SEQ ID NO: 9652 - protein, 123 aa, Bacillus licheniformis
MKTRAGGLIAAVLIAVAGVFILQKATGGLVPLADDYIQGQGKPEAYYLKAEDHAEKPDNGKYNYTLTGYDASGHKQQIEAEADEKLHPGAFIKVLAYGTKAKSLTEVHEEEIPEGALAAMKTN

SEQ ID NO: 9653 - protein, 224 aa, Bacillus licheniformis
MKVKTKLLGIISILVVSILGIGISSVFMISSTVKKNEELKDKMEFQKEIKHIQYRLTGLSNDERALIMTGDDEYSEGMKDKADDVLKSLDRAGKLIREKSYKANVEEIKENFKAYWDLNQQVMQTYASSLKKAESIHFGEERTLRKDVLDPSVNQLVESLEQEVDDLKAEIRANGTMSEWVIIAVTGVSAILGIVLSLLLLKSILVPLRSLNQQLEDTPTARRI

SEQ ID NO: 9654 - protein, 474 aa, Bacillus licheniformis
MDILEILGKINKVLWGPPSLILLFGTGLFLTIVLKGLQFRRLIYAFKIGFGKEDSKDAAAEGDVSHFKALMTALAATIGNGNIAGVATALTLGGPGSIFWMWVVGLLGMATKYAEALLAVKFRVKNEKGEYSSGPMYYIEHGLGRKFKGLAIAFALFGAFAALGIGNSVQSNTIADITKNSFGIENWVTGLILVILVSVIIFGGIQRISTVASFFVPIMAFLYMGGAILILILNYDKIIPAFALIFYYAFHPVAAAGGFLGIAVSEAVRNGVSRGIFSNEAGLGTAALIAGNARADHPVKQALVAMTGTFIVTIVVCTMTGLTLIITGFWDPSGGLISGVAHNASLEGGALTSAAFASVLGAAGEYIVSLSVIFFGFSTIVGWYVYGEKCFEYLAGAKGIAGYRLVYILACGIGTVANLVTVWAFADMANALMMIPNLIAILLLWKVIKAETNDYFHHFYEHTKSAGPPSKPIH

SEQ ID NO: 9655 - protein, 376 aa, Bacillus licheniformis
MIIGIPKEIKNNENRVAITPAGVVALKKSGHQVLIEQGAGLGSGFEDADYKAAGADILAEAKDVWGKADMVMKVKEPISSEYGYFRKGLVLFTYLHLAAEPKLAKALVDSGVTAIAYETVEVNRTLPLLTPMSEVAGRMASQIGAQFLEKSKGGKGILLSGVPGVKRGKVTIIGGGVVGTNAAKIAVGLGADVTLIDLSAERLRQLDDQFGKDIQTLMSNPLNIAEAVKDSDLVIGAVLIPGAKAPKLVTEEMIKSMSPGSVVVDVAIDQGGIIETVDKITTHDDPTYTKHGVVHYAVANMPGAVPRTSTIGLTNVTMPYALQIANKGVEQAVAENQALALGVNVANGSITYKAVARDLGYEYVSVEDAFQTVTAG

SEQ ID NO: 9656 - protein, 425 aa, Bacillus licheniformis
LMKNVLAVFVVLIFVLGAFGTSGPAEAARDSGTAKSDLYVEKVSGLRKDFIKGVDVSSIIALEESGVAFYNESGKKQDIFKTLKEAGVNYVRVRIWNDPYDANGNGYGGGNNDLEKAIQIGKRATANGMKLLADFHYSDFWADPAKQKAPKAWANLNFEDKKTALYQYTKQSLKAMKAAGIDIGMVQVGNETNGGLAGETDWAKMSQLFNAGSQAVRETDSNILVALHFTNPETSGRYAWIAETLHRHHVDYDVFASSYYPFWHGTLKNLTSVLTSVADTYGKKVMVAETSYTYTAEDGDGHGNTAPKNGQTLNYPVTVQGQANAVRDVIQAVSDVGEAGIGVFYWEPAWIPVGPAHRLEKNKALWETYGSGWATSYAAEYDPEDAGKWFGGSAVDNQALFDFKGRPLPSLHVFQYVDTGTPFKN

SEQ ID NO: 9657 - protein, 684 aa, Bacillus licheniformis
MPKIYTTQARYMLHGGDYNPDQWLDRPDILADDIKLMKLAHTNTFSVGIFSWSALEPEEGVYTFEWLDDIFESIHRNGGRIILATPSGARPAWLSQKYPEVLRVNAERVKQLHGGRHNHCFTSYVYREKTKEINRMLAERYGSQHALLMWHVSNEYGGECHCDQCQHAFRDWLKKKYNHDIKSLNDAWWTPFWSHTFNDWSQIESPSPIGENAVHGLNLDWRRFVTDQTISFFQNEIVPLKEITPNIPITTNFMADTHDLIPFQGLDYSKFAKHLDVISWDAYPAWHNDWESTADLAMKVGFINDLYRSLKQQPFLLMESTPSAVNWHDFNKAKRPGMHLLSSVQMIAHGSDSILYFQWRKSRGSSEKFHGAVVGHDNCSENRVFKEVAKVGQTLEALSEVTGTIRPADVAILYDWENHWALQDAQGFGMKTKRYPQTLHEHYRAFWERDIPVDVITKEQDFSSYRLLIVPMLYLASEETIARLKAFAANGGTLVMTYISGIVNESDLTYLGGWPKDLQEMFGMEPVETDTLYPGDKNAVRYQNRSYELKDYATVLKLSTADPEGFYEDDFYADTTAVTSHPYKQGKTYYIGARLSSQFHRDFYGTLIKELAIQPALDVKHQPGVSVQVRQDEENDYIFIMNFTEKRQPVVLASAVKDMLTGETLAGEVTLEKYEARIAVKAKE

SEQ ID NO: 9658 - protein, 279 aa, Bacillus licheniformis
MKKRRFFRLLLTYSLLAFMTAVIIYPLLWTVGASFNPGNSLVSTSIIPANPTLDHYKELFAGKESLQYGQWYINSLKISIFTMIGSVISVSFTAYAFSRFRFKGRKNALVLFLLLQMIPQFSALVALFVLAQMLGMMNSHWLLILLYIGGLIPMNTYLMKGYMDSIPIDLDESAKIDGASNTRIFLQIIMPLSKPMIAVVAMNGFTGPLGDFVLSSTILRTPESYTLPIGLYNLVNEVMGASYTTFAAGAILISIPVAVIFIMLQKNFVSGLTAGGTKG

SEQ ID NO: 9659 - protein, 418 aa, Bacillus licheniformis
VQHRKKALLLSIIPGLGQFYNKQWIKGLLFLLLGVSFFAVFGDLLNMGLWGLFTLGTEVPRDNSIFLLAEGIIAVIVTCFGLAVYYANLRDAYQNGKRRDEQKELSSLKEQYHNLIAQGYPYLISGPSLFILVFAVVFPILFSFALAFTNYNLYHSPPARLVDWVGIKTFSEIFTVDIWRSTFLDVLAWTIVWTLVASTLQVGLGILLAVVVNQKEVRFKKIFRTILVLPWAVPGFVTILVFAGLFNDSFGAFNHQILAAFGIDPIPWMTNANWTKLALILMQGWLGFPYVFIVTTGVLQSIPDDLYEAATIDGASAFSKFRHITLPLILIAMAPIIITQFTFNFNNFNIIYLFNGGGPAVPGSTAGGTDILVSWIYKLTMQSSQYSLAAALTILLSVFVISIALWQFRRTNSFKEGA

SEQ ID NO: 9660 - protein, 422 aa, Bacillus licheniformis
MMNMKKYVGISSVIALSLSLTACGPKESSNGASDSKQKELVVWEDKEKSEGIKDAVAQFEKEHGVSVKVVEKPYAKQIEDLRMDGPAGTGPDVLTMPGDQIGTAVTEGLIKELKVDKEIQSIYTEPAMRSQVTNGKVYGLPKAVETTMLYYNKDLISEKELPKTLDEWYEYSKKTADGKKFGFLALFDQIYYAQSVMGGYGGYIFKSDADGTYDPADLGLNNKGAVEGAEYIQKFYQEGLFPAGIIGEQGINVLESLFTEGKAAAIISGPWNLEPFKKAGINYGVAKLPKLSNGKHMSSFVGVKSYNVSAYSKNADLAEQLVVFLANKENSKKRYEITKEVPAVKELADDPAVTKSEAAQAVAEQSQYSELTPNIPEMNEVWTPADAALQTIATGKAEPKKALDQAAETIQGQIKAKHSGSK

SEQ ID NO: 9661 - protein, 41 aa, Bacillus licheniformis
VKALYKNNIACLRKSVNNYFTYSSKMFYEKSAACEQQPALF

SEQ ID NO: 9662 - protein, 330 aa, Bacillus licheniformis
VATIKDVAEKAGYSISTVSRVLNNDESLSVPDETREKIFEVAESLNYRKKTIRTLVKNIAFLYWLTDKEELEDVYFKTMRLEIEKLAKQFNVELATYKISGGIDAIPENIEGFIAVGSFSDDELIRLRQMTPHGVFIDSTPDPNHFDSVRPDLKQMTRKTVDFLIEKGHEKIGFIGGTYHNPNTDEDEMDVRERTFREYMKEKGLLEESFIFCRRGFSVENGYHLMDKAVETLGEKLPTAFFTAADPIAVGCLQALNEKGIAIPGRVSIISINNISVAKYVSPPLTTFHIDIKELCKNAIELLLEQILQKRKALKTLYIGAELVVRKSTN

SEQ ID NO: 9663 - protein, 389 aa, Bacillus licheniformis
MNTAAALSNDFRSIFKTEKTPRTFFAPGRINLIGEHTDYNGGHVFPASISFGTYALGVKRDDQMIRFYSKNFPDEGIIECSLSDLAFDQSDGWANYPKGMFLLTKAAGHQIVHGADILYYGNIPQGAGLSSSASIELATGVLLKGLYDLQTDTISMVKLGQKVENEYIGVGSGIMDQFAIGMGKKDHAILLDCRTLDYTYAPFVLKEHDVIIINTNKQRTLAGSKYNERRAQCEEALGDLQQELSIASLGELTMEGFEAHQHLIRNEINQKRAKHAVYENARTLKALEKLREGDLAGFGKLMNESHLSLRDDYEVTGLELDAIVQAAWEQDGVLGARMTGAGFGGCAIAIVEKDRTDSFKERVNAVYRETVGYDAAFYTAAIGDGAKEI

SEQ ID NO: 9664 - protein, 333 aa, Bacillus licheniformis
MSVLVLGGAGYIGSHAVYQLIDRGENVVVVDNLETGQRQAVHPDAIFYEGDVRDRDFLRTVFEKERIEEVIHFAASSLVGESMKDPLKYYDNNVSGTQVLLQAMLEHDVKKIVFSSTAAVYGEPESVPITEDMPTMPTSTYGETKLIMEKLMKRTEEAHGISFVSLRYFNVAGARETGEIGEDHRPETHLVPLILQTALGQRPHITIFGDDYDTPDGTCIRDYVHVEDLIDAHLSALDYLRKGGKSDIFNLGSSEGFSVKEMIDAARKATGKDITAEIGKRRAGDPSILIAGSHKAKQVLGWRPSRTSVAKIIEDAWKWHSSHPNGYRKEVST

SEQ ID NO: 9665 - protein, 495 aa, Bacillus licheniformis
MIEQDIAGLIQKALEAGLIEPADVNYARNQVMNLLGLESFPEEATAASGDSIPDLLEKLAAYAVEHGVITDDLDAKDMLAANVMNCFVARPSVINAVFQQKYEQSPLAATEYFYQLSKNSNYIQTKRIEKNISYQMDTPYGTMDITINLSKPEKDPEQIKRERAAAKQSRSYPMCLLCKENEGYAGRIGYPARANHRIIKVPLAGENWYFQYSPYSYYNEHSILFSEQHRPMKIDKLAFHRLLAFTELFPHYFIGSNADLPIVGGSILSHDHYQAGRYEFAMTRAEGAFSFQIKQHPAIEASVLKWPMSVIRLKGTAINSLVEAADHIFQTWKNYSDQQADISAFTDGTPHNTITPIARNVSGVYEIDLVLRNNRTSAEHPYGIFHPHADVHHIKKENIGLIEVMGLAVLPPRLKTELAAVKEFLLGQSDAVEAHHREWAEQLKTEYGEMSEPEQAESIVRKELGKKFVKALEDAGVFKDRKAFMRFIRTVNHQG

SEQ ID NO: 9666 - protein, 390 aa, Bacillus licheniformis
MQRGTFQLMKSVNKSIILNKIRTSEPISRAEIAKETKITPPTVSSIVKELIEQGLVKESTLGHSSGGRKPTMLHINTGAYYVIGIDAGPETVECILTDLAGGILQRTSSLLKKPLTNERFMEVLKESVYAILGRADVEQEKIIGIGIAMHGVVDAETGMSRIAPILNLTNIPIKDVLEQEFNLTVRVENDARAMALGESWFGGRDDAGSMAAVNIGRGVGAGIVINGKLYHGAEGIAGELGHMIIDINGEKCECGNRGCLQTIVSGKAIAERGKKRLKESTDSLTAKDLFEMAENGCQTCIELFQETGVIIGIGLTNFIHLVNPGKIVLGGGVMKGGRFILPAIRETIQQKALTAEARQTEVTITKLGDEATLYGAVSLLLAELFDPVLK

SEQ ID NO: 9667 - protein, 41 aa, Bacillus licheniformis
LPQKWSKHKGHLLPLLFCFRGAFKALLQNKWFLNGKIFQKI

SEQ ID NO: 9668 - protein, 243 aa, Bacillus licheniformis
MSESKGLLYPEKWLSRASTGVRVACELRMRIISGLIESGTILSENKLAAEFSVSRSPIREALKILASEKIIRLERMGAVVIGLTEKEIGEIYDVRLVMETFVFERLGQANVDELVTDLSKILEMMKVSIKYKDADEFSFQDVLFHETIVRSINHSYILMIWNNLKPVMESFILLSMRARLKEKYEDFERILDNHELYIQAIKTKDRDLMLKSLHQNFDDVQGKVEDLWLSQQMLAKGAEQQND

SEQ ID NO: 9669 - protein, 513 aa, Bacillus licheniformis
MTSYMLGIDIGTTSTKAVLFSEKGDVIQKESIGYPLHTPDISTAEQNPDEIFQAVIQSTAKIMQQHPDKQPSFISFSSAMHSVIAMDENDKPLTSCITWADNRSEGWAHKIKEEMNGHNIYKRTGTPIHPMTPLSKITWIVNEHPETAAKAKKYIGIKEYIFKKLFDQYVVDHSLASAMGMMNLKTLAWDEEALAIAGITPDHLSKLVPTTAIFHNCNPELAAMMGIDPQTPFVIGASDGVLSNLGVNAIKKGEIAVTIGTSGAIRTIIDEPQTDEKGRIFCYALTENHWVIGGPVNNGGIVLRWIRDEFASSEIETAKRLGIDPYDVLTKIAERVRPGADGLLFHPYLAGERAPLWNPDVRGSFFGLTMSHKKEHMIRAALEGVIYNLYTVFLALTECMDGPVARIQATGGFARSDVWRQMMADIFESEVVVPESYESSCLGACILGLYATGKIDSFDVVSDMVGSTHRHAPKEESAKEYRKLMPIFINLSRALENEYTQIANYQRSLTSKK

SEQ ID NO: 9670 - protein, 448 aa, Bacillus licheniformis
MPLLIVAIGIVALLLLIMGLKLNTFVSLIIVSFGVALALGMPFDDIVKTIEQGLGGTLGHIALIFGLGAMLGKLIADSGGAQRIAKTLVNKFGEKNIQWAVVIASFIIGVALFFEVGLVLLIPIVFAISRELKISILYLGIPMTAALSVTHGFLPPHPGPTAIAGELGANIGEVLLYGIIVAIPTVLLAGPLFTKLAKKIVPQSFEKMGSIASLGEQKTFKLEETPAFGISVFTAMLPVIIMSISTIITLIQETMGLADNSFLAAIRLIGNASTSMVISLLVAIYTMGIARKIPIKQVMDSCSTAITQIGMMLLIIGGGGAFKQVLINGGVGDYVAELFKGTAMSPILLAWVIAAILRISLGSATVAALSTTGLVLPMLGQSDVNLALVVLATGAGSVIASHVNDAGFWMFKEYFGLSMKETFATWTLLETIIAVAGLGFTLLLSLFV

SEQ ID NO: 9671 - protein, 467 aa, Bacillus licheniformis
MCNTIGVIGLGVMGSNIALNMASKGEQVAVYNYTRDLTDQLVQKTGGQTVKPYYELEDFVQSLEKPRKIFLMVTAGKPVDSVIDSLVPLLEEGDVIMDGGNSHYEDTERRYDSLKAKGIGYLGIGISGGEIGALKGPSIMPGGDRDVYEKAAPILTKIAAQVDGDPCCVYIGPKGAGHFVKMVHNGIEYADMQLIAEAYTFLREKLLLPIDEIADIFDTWNQGELNSYLIEITAEILRKKDEKTGAPLIDVILDKTGQKGTGKWTSLQAVDNGIPSSIITESLFARYLSSLKDERTAAEKVLAGPATEERRLDQNVWIDRVRQALYMGKICAYAQGFAQYKMTSDLNGWNLPLKDIALIFRGGCIIRAQFLNLISEAFDKQPDLSNLLVAPDFAEKLKEYQSGLRKVVCEGISSGISFPCLSTALSYYDGYRTGRSNANLLQAQRDYFGAHTYERTDMEGVFHTDWY

SEQ ID NO: 9672 - protein, 39 aa, Bacillus licheniformis
VHSYFTQMDFHTLFNISQTYISNSCYDKFSNRKGGLMPK

SEQ ID NO: 9673 - protein, 867 aa, Bacillus licheniformis
MAIEEKDMKQKQNATNMIDQLVEKGLKALEEFRSFDQEQIDEIVKQMALAGLDQHMPLAKLAVEETKRGVYEDKIIKNMFATEYVYHHIKYDKTVGIINENEHDGVIEIAEPVGVIAGVTPVTNPTSTTMFKSLIAIKTRNPIVFAFHPSAQKCSREAARILRDAAIRAGAPDNCIQWIETPSLDATQALMTHPNVSLILATGGAGMVKSAYSSGKPALGVGPGNVPCYIEKSANLKQAVNDLILSKTFDNGMICASEQAVIIDKGIYSDVKAEMTRNNCYFLNKTEKSKVEKLVINENTCAVNADIVGMPAFKIAEMAGIKVPQDTKILIAELEGVGPDDPLSREKLSPVLACYKVSGLEEGLKRAEEMLAFGGTGHSAVIHTNDQEAVKEFGLRMKAGRIIVNAPSSQGAIGDIYNAYMPSLTLGCGTYGGNSVSSNVGAVHLINTKKVAKRNVNMQWFKVPPKIYFEKHATQYLAKMPDISKAFIVTDPGMVKLGYVDRALHYLRRRPDYVHCEIFSDVEPDPSIETVMNGVDMMAKFQPDVIIALGGGSAMDAAKGMWMFYEHPDAEFFGLKQKFLDIRKRIVKYPKLGGKAKFVAIPTTSGTGSEVTSFSVITDKETNTKYPLADYELTPDVAIIDPQFVMTVPKHITADTGMDVLTHAIESYVSCMANDYTDGLAMKAIQLIFEYLPRAYKNGSDELAREKVHNASTIAGMAFSNAFLGINHSLAHKLGAEFQIAHGRANAILLPHVIRYNAAKPKKFTAFPKYSHFIADQRYAEIARTLGLPAKTTAEGVESLIQEIISLAKELKIPMSIKQNGVDAAAFESKVDLMAERAFEDQCTTANPKLPLVSELAEIYRSAYKGV

SEQ ID NO: 9674 - protein, 187 aa, Bacillus licheniformis
MSLIGKEVQPFAAKAYKNGEFIDVTHEDLKGQWSIFCFYPADFSFVCPTELEDLQNHYEALKELGVEVYSVSTDTHFVHKGWHDSSEKIGKITYAMIGDPSQTISRNFEVLNEEEGLADRGTFIIDPDGVIQAVEINAGGIGRDASILINKVKAAQYVRQNPGEVCPAKWEEGSETLTPSLDLVGKI

SEQ ID NO: 9675 - protein, 509 aa, Bacillus licheniformis
LVLEANIKAQLNQYMQMIENDIVLKVSAGDDSVSKDMLALVEELASMSSKITVEKAQLDRTPSFSVNRAGEDTGVTFAGVPLGHEFTSLVLALLQVSGRPPKVDQKIIDQIKNISGEYRFESYISLTCHNCPDVVQALNMMSVLNPNISHTMIDGAAYKSEVESKNIMAVPTVYLNGESFGSGRMTLEEILAKMGSGTDASELSDKEPFDVLVVGGGPAGASAAIYAARKGIRTGIVAERFGGQVLDTMSIENFISVKRTEGPKLAASLEEHVKDYDIDVMNLQRAKGLEKKDLFHLELENGAVLKSKTVILSTGARWRNIGVPGEQEFKNKGVAYCPHCDGPLFEGKDVAVIGGGNSGIEAAIDLAGIVNHVTVLEFAPELKADKVLQKRLYSLPNVTVVKNAQTKEITGDENVNGITYVDRETGEEKHVELQGVFVQIGLVPNTEWLPETVERNRIGEIAVDKRGETTIPGLFAAGDCTDSPYNQIIISMGSGANAALGAFDYLIRN

SEQ ID NO: 9676 - protein, 106 aa, Bacillus licheniformis
MYFSAKKKIRGWKRLKRRIEWWKSDNIQLNMEYLRDHHRDYVKLWISPFYGLQTVTPPLWYKRLLLEAMIDVYHEWHKQLKAENEDFYLKIWLYEPDFIRSQIVAA

SEQ ID NO: 9677 - protein, 337 aa, Bacillus licheniformis
VFKKPKVFIAAVILALSSFAGTAAYAQSGYFNTYTDYVSMSKSGYFTAMQGMCVDRNNNVIYAAKLNNTNHTTQLFSVKMSGTASNRTVALLKNSDTNTTSYDLGHANDLAVKASAGDKSVSVYVAPMSDGTKYANKIVKLSVDTTKNTYKVAKTYVLNYQGSNLSIGGITYSVGTDKFIVRSGKRFFIGTFNDTTGKFDYEATFKLNYSKAVVNHQTMDVSHFIQQGISFYQGTLYVPLTKPDSNGNASNVSIILTYPLNINEMIKEQKTNPIQDFSKELFTRSDLSFRITSSAYTLFEIEAVDFDDGTLYFNTNRGKSGTQNDMIATFNDYNYYK

SEQ ID NO: 9678 - protein, 547 aa, Bacillus licheniformis
MNELVFEKREFTQDHVNVVKAMHINNYPIVYILYNEKKKPTAYIGQTVQAARRLKNHIDDEKRKSLNRFILIGHEKFHQSATYNIESNLINYFIADNRYQLQNVSQTRSREMHNYYQKPFYNENIFQVIWEKLRKEKIVNDSLENLRNKDIYKLSPYKELSPQQLDIKNKILDFCKERIQKEGNHVIVIEGDAGTGKSVLLSSLFNTIQDLAKSEDSFLKETDNYLLVNHSEMLKTYKSIANSLPNLKKKSFMKPTPFINEKTKTGATADIVLVDEAHLLLTKEDSYNHFRYQNQLDEIIKRSKITVVIFDPKQVLKIKSYWNERLLEEIINQYDAKTVKLTDQMRMNANPETIKWIDSFVEKKVLPFPTEDSSFELKIFEDAAAFKTAIERKNSEDGLSRIVSTFDYLHKKDKKTYIVDEEGINMPWNSTQDKVTWAENPNSIKEVGSIYTVQGFDLNYVGVVLGPSVSYDEEKDELVIDTSKYKDTGAFVLRTDLSPEQNEQIKEQIILNSINVLMKRGIQGLYIYATDPKLKKRLLELERGKWS

SEQ ID NO: 9679 - protein, 103 aa, Bacillus licheniformis
MNDIQSLINAINEFRDERNWRQYHNPKDLAISISIEAAELLEDFQWISSEEALKANKENIREEIADVLIYSFMLCNDLGLDVKEIVEEKIVKNGRKYPVNHNG

SEQ ID NO: 9680 - protein, 298 aa, Bacillus licheniformis
MSNVVSLTNVTKTFRQKTAVDQIDFSIKKGEIVAILGPNGAGKTTTISMILGLLKPTAGNITLFDSMPHEKRVREKIGTMLQEVSVMPGLRAGEIIELIRSYYPKPLSFQKLRTLTGLTDKDLKTQAEKLSGGQKRRLGFALALAGDPELMIFDEPTVGMDITSRNRFWQTVQSLAEQGKTIIFSTHYLQEADDAAQRILLFKDGKIVADGTPLQIKSRISKHSVSFIVDPEQSLEKLYQHPETEQIFRKNNRVYIDTANTDKILELIFSEKIGAYDIQIERGNLEEAFRQLTSKGDE

SEQ ID NO: 9681 - protein, 245 aa, Bacillus licheniformis
MNVFQMQCRMEIKRMLRNRYFVFWSLAMPIAFYYIFTNVVNTNAPDPAAWNAHYLMSMTTFSVMGSSIMTLGIRMVQERTQGWSTFIRVTPLPDHIYFIAQMSGQSVIHILSITVIFLAGALINGVSLSPLEWFLCGLWALLGSLPFLAIGTLIGMMKKVDTAAGISNVLYMGLAVCGGMWMPLEIMPKMMQNIGHWLPSYHYGSGAWEIARGQMPNWKNILFLLAYSIVIMLLSKYIRRKQEAV

SEQ ID NO: 9682 - protein, 379 aa, Bacillus licheniformis
MKKNFSMFPKRYGFFPYIFLIYLLLPISYLTNQTSGIKQLIGFGLVLLFLVTYRQLFFIPPQKKLFTYWLAIQLSIILIYTVFYDINLVFLGFFSANFIGYYREKKTFRCGLASLVVVLVAPFIYHLLNDRSLQNQLFYFLPFLVIMLISPYGIRSMNRRMELEQKLDEANQHIKELVKREERVRIARDLHDTLGHTLSLLTLKSQLVQRTIASAPERARTEAREMETTSRAALKQVRELVSDMKTATIAEELIHIQQILRAADITFEYMGGSDFSNIPPVTQNIVSMCIREAATNIVKHSRATHCTISISQTDDKISITIKDDGMGMDQQTPFGNGLRGMKERLALIDGALDVSTHDGTVLSIAVPNVKKAEGKEAIQ

SEQ ID NO: 9683 - protein, 200 aa, Bacillus licheniformis
MIRLFIAEDQRMLLSALGSLLDLEEDMEVIGQATNGEEALTAILKLEPDVCLIDIEMPVKSGLEVAEELAKQGAKTKIIILTTFARPGYFERAVKSNVHGYLLKDGEIDDLADAIRKCTEGKRTFSPELTFNAVRETNPLTEREQDILRLAYIGKTTKEISEELFLSSGTVRNYISEIMQKLDAKNRMEAARIAEGKGWI

SEQ ID NO: 9684 - protein, 657 aa, Bacillus licheniformis
VYKRIIVAVAGALFALLALLAAIITDLYDRDFPQAIGAESRLNLDFSESGLSITEAFAKLEKLDARWNLGLVKVAPDLASDGDGQVYVALNDRDLPDEFTWFGGDGAGKIVGKDRLETSYPDGFYLVTGEKAHLSEFEDTLKSEGVKVGRGDASIFKSLEFVVRERGFAAAVLAAFALIAALALFWLSLRARGRALRVLGGCPTSRIQVQDLAGFGGALLVSAVAVALVASCYVGLFHGWIYVGTFLKALFSLQVAVITVSLLATLIMSASAWPSATMIATRQPAVKSLRSAAIVIQALTFLLVVAAAGPAWSAYKHSSAIAAEMAQWKKLADQVAIVFATDVDEMNHMEPQIGKLVKDAESLDKVAFSYTYTQEMPMPADFGEYSAISYVNQRWLDMVTMDAPQPAVTKVPYHSIPKGLVKMIREEAELLSRKELSDEQFGKFKFLRPIDGFRLPVAQGGGGERLHFADDVLVVVVPSLYDTYNDSALTSMVSGSNIVFTGVTATQELLGKHGLDVKALRDRDINGELKVVYVAEEGILRAQFAAYVVWLLNLALIALVIAFTVAAAISALITALLQAKRDFPLRVAGQSWVRILRSRVAKEMLVGVGLVGVVVLLQRPDEIGAVLVAAVYGLLVVPLSHLFAVRWCFDRASKRRI

SEQ ID NO: 9685 - protein, 118 aa, Bacillus licheniformis
MKSTTKIIIGVVIGLLLAVGTIAFLNGWITVSRDTHPPCDQLPNVTEANAALSRHQDLVEEIKALGDDITVEVGKPCPDDENQGLVMVSYGSRSEHDAISDLLSRRDGFGVPVHLVKR

SEQ ID NO: 9686 - protein, 231 aa, Bacillus licheniformis
MLIEAQGISVAIGGRTVLDGETVQCPPGVMTALVGPSGCGKTTLLHCLGLLLPVNQGRILIDGHDVTSYGTAARRRFWRDHAAFILQDYGIMDEESVAFNVTMQASILGRRVTGNQERLAQVLEQTGLQGREGELASHLSGGEKQRLALARAIYKDAAFLFVDEPTASLDSTNRRKVIDLFADFAARGRTVIVSTHDSEMINACGARHKVGSSSSSKPLSTNDPGNLGGNS

SEQ ID NO: 9687 - protein, 47 aa, Bacillus licheniformis
LRGAAFYAPRVFILKIFKLMYLYKKEMLSVYCQSISTKDSAYLQEKT

SEQ ID NO: 9688 - protein, 126 aa, Bacillus licheniformis
MKNHLYEKKKRKPLTRTIKATLAVLTMSIALVGGATVPSFAWVNPGYHYQYPSEGGTWRYGFVNAGLRSEYNHPTKVHGSTVQKLIDGKVDKTNRSIDTAAGRYSNAYVGAINSPGLKGRYYYRTN

SEQ ID NO: 9689 - protein, 39 aa, Bacillus licheniformis
MLTPEDHLIRLASENVDRVALSFRNTPNVEELAQSAYAV

SEQ ID NO: 9690 - protein, 52 aa, Bacillus licheniformis
MVEEVKEADVKDEGLLSLFPKTIRRKIQYRRNRLAKANAALQELEERTPEEK

SEQ ID NO: 9691 - protein, 28 aa, Bacillus licheniformis
VKRQTTTADAKHYSPENILPKKQIKQDT

SEQ ID NO: 9692 - protein, 159 aa, Bacillus licheniformis
VNISIVAIGKLKEKYLKQGIDEYVKRLSAYAKVDIIELPDEKAPENLSDQDMKIVKDKEGERILSKISPDAHVIALAIEGKMKSSEELADNMDRLATYGKSKVTFVIGGSLGLSDAVLKRADEKLSFSRMTFPHQLMRLILLEQVYRAFRINRGEPYHK

SEQ ID NO: 9693 - protein, 52 aa, Bacillus licheniformis
MKSCEEHIETVIDMYVDEEELAPEIRKIEHTHSLSTTCELCDKPAVYIVGNE

SEQ ID NO: 9694 - protein, 179 aa, Bacillus licheniformis
MTRIKRPGRTVLRKEECFSMSKELEEFPKIKPLYAVLLTIITSGIYIPYWFLSRRKNLERCQIKLPYVAIKVTLLLSVFSILEPFWTFYSITFQSEDLLPYSNSILLLPLRPGHSFLPQLSFLLFWTVNLYSAFKVRKAFIGLSEKQVNGFWTFILNVSYLQYITNQHSLVVQEKREAV

SEQ ID NO: 9695 - protein, 173 aa, Bacillus licheniformis
LMLKSKIKIDLNKPRKKPEIRLTPMTEEDFKIYQTYSIQHYAMEKVKAGTWTVAEAMEKAEEQFAALLPNGIETINHYLWSIMNDSGNAAGWVWIYADPHHPQKEAFIYDFGLYEAYRGQGIGQQALAVLEEEAKQLGVKKLSLHVFAHNKKAKRLYEKMNFETTDLHMSKRL

SEQ ID NO: 9696 - protein, 156 aa, Bacillus licheniformis
MNDNVQAALKTLSNVKSRSILSVFVLCLITLGVYIPYWFLSRKKSFDLLPYHDIPYTTLKAIIFYHLFSIPIRISAKIAFPDMHYSLYMLLDRVILILSAGVLIYCALVVTASLNKLSGKEPANGSIFAFLLNIIYIQHRINKLSEPKSEWLSKAS

SEQ ID NO: 9697 - protein, 281 aa, Bacillus licheniformis
MSQHALVLQSDFGLDDGAVNAMYGVAYSVDSSIRIFDLTHNIPVFHICEASYRLLQSVSYWPEGTVFVSVVDPGVGSERRSVAVRTSSNQYIITPDNGTLTHISRQNGIAEARYLDEAQNRLPKSGESHTFHGRDIYAYTGAILAAGALSFDRIGPEVSIDSIVKLPVMEAYIENDWITGTIDILDVRFGNLWTNISRTLFKSLDVQYGDPVEVVIKHEDTKVYQQTLAFGRSFADMPVGKPVVYINSLDRLGIALNQGSFAKTYHIGTGINWRISLRKSI

SEQ ID NO: 9698 - protein, 35 aa, Bacillus licheniformis
LEFTPKNSIIHSEKISFHSPKITFFPFDDHSLGAS

SEQ ID NO: 9699 - protein, 403 aa, Bacillus licheniformis
VEFNHDEEKFVREKPVRSWRSFLFSSLVGAVIGALLTLFALPYLSQQGWLPYNLQVIEARGGQGAQQGGTVRNVSVNVNNEVTQVVSKVSDSVVGVINIQKTGVWDGDSEAGTGSGVIYKKDGNTSHIVTNHHVIEGASQIEISLNDGTRIPAKLIGSDKLMDLAVLQVNSNKIKAAAEFGDSDKVKTGEPVIAIGNPLGLQFSGSVTQGIISGTERAVPVDSNGDGQPDWNAEVLQTDAAINPGNSGGGLFNIDGKVIGINSMKIAESAVEGIGLSIPANLAIPVIEDLETYGEVRRPYLGIEMKSLGDIASYHWQETLKLPKNVTSGVVVMGVQPVSPAGRAGLKELDVIVEFNGDRVYDIVDLRKKLYTKNVGDKVKIKYLRGGKEKTTEVKLTRSQLGS

SEQ ID NO: 9700 - protein, 264 aa, Bacillus licheniformis
MSLQFSVLASGSTGNALYLETDDHAFLVDAGLSGKAMEGLMAQIDRKLDQLDGIFVTHEHSDHIKGLGVLARKYELPVYANEKTWKAMEGHIGKMDNGQKFVFPMETVKSFGSLDVESFGVSHDAAEPMFYVFHYNGRKLALITDTGYVSDRMKGIIRSANAFVFESNHDVGMLQMGRYPWNIKRRILSDVGHVSNEDAALAMTDVIGDETSRIYLAHLSQDNNMKELARMSVQQTLAAKGFAAGETFDLYDTDPKKPTPLVAV

SEQ ID NO: 9701 - protein, 282 aa, Bacillus licheniformis
MEWNRTKTIFIIVFLILDIFLAFQYFDKRSNNQFPILEKSTLQEDMKADHISYGNLSKETSKGSSISAQKRVFKQSEIKSLKGQKPKALMNTAKENALTEIEMEFETPIALPKTDMKTKAREIVNEEIIDGNKYKLWKVDKSGKQIVFFQTYNGNYIFQDRQNDDNNEMGEVVLYLNNKNEVVSYKQSMLQDIKEVKTENLISAVGAVEALYYPDYLKKYSKIKSAELGYFTQYPLASAQIFVPVWRIEVERKTDDKTIHEEFIVDARDGALLQSQEKKEKS

SEQ ID NO: 9702 - protein, 454 aa, Bacillus licheniformis
MKRETIKTIILSLLVLISLLFTFNIWGFQGNYEKVEDSQAQVSDKQPITNQTKLLNEAVKPQQMFIHENGQHYLLNDTTLYSQLWDDMGRWEVKSLKDISDKFDRQQFKNWLYAKNKDSKLDLVFSDNIPIDVLQPLFKWSANSYEYNSFDRIVLPFNEGRGMKKIYFVSFSKETVVEAVIESANYRNILSDIEKEKSQMPLYEDFAINSRRDVLLPVNRLKLSEKEYFTETISPTRFKKALFDDPQTVRQETNLNRPVYTDGTSLLEIYSNNRQIKFQHRNLEPSTSYQNGELINKSFKYLNDTGSWTDDYQFFGLNENQQINFNLFMDQLPVVNSQNQPFGTTSIELRWANNDILDYKHPTYVLGANANPVSKKDKEIMSGEELIQFLQDNEEYDFDKIEQIFPAYEMVSVSEEQDPLVKLVPTWCIKINGTVKPVSKKDSAVKEGIENGVE

SEQ ID NO: 9703 - protein, 614 aa, Bacillus licheniformis
MNKVSFFRSIHFKFTLIYVLLIIVAMQIIGVYFVNEMEKSLLKSYNDSLDQRVNNLSYYLEQEMTKDRSTSSSSTLKEDAERILNDFSKEGEILEVSLIDKSYEVIATSNPYNREVAGKKTTEGIIKRTLLVGIPYENKFFDPERDSKVRISVTPIKKSNQETIGAIYVVASMDNVYNQIRTINTILASGTFIALGITAFLGIFVARTITHPLSDMRKQAIELAKGNFSRKVRKYGNDEIGQLATTFNYLTRELKEAQSMTEGERKKLSSVIAYMTDGVIATNRNGAIILLNTPALELLNVSRETALEMPITSLLGLEDEYTFEDLVEQQDSLLLEIEQEERTSVLRVNFSVIQKEHGKIDGLIAVIYDVTEQEQIDQERREFVANVSHELRTPLTTMRSYLEALAEGAWQDPNIAPRFLNVTQNETERMIRLVNDLLQLSKFDSKDYQFNKEWIHFIRFFSLIIERFEMTKEQHVEFISNLPDRELYVEIDPDKITQVLDNIISNALKYSPEGGHITFSVDVNEEEELLYVSVKDEGVGIPRKDVEKIFERFYRVDKARTRRLGGTGLGLAIAKEMVQAHGGDIWADSIEGKGTTITFTLPYKEEQEDDWDEA

SEQ ID NO: 9704 - protein, 235 aa, Bacillus licheniformis
MEKKILVVDDEKPIADILEFNLKKEGYEVHCAYDGNEALQMVEDLNPDMILLDIMLPNKDGVEVCREVRKKYDMPIIMLTAKDSEIDKVIGLELGADDYVTKPFSTRELLARVKANLRRQNTAAPAEEESSSNEIQIGSLVIFPDAYVVSKRDETIELTHREFELLHYLAKHIGQVMTREHLLQTVWGYDYFGDVRTVDVTVRRLREKIEDNPSHPSWIVTRRGVGYYLRNPEQD

SEQ ID NO: 9705 - protein, 45 aa, Bacillus licheniformis
LDTASGWLSMFYIKVHCMSSLKKHFLEIEIDFLYIITFMKQKLKK

SEQ ID NO: 9706 - protein, 136 aa, Bacillus licheniformis
MERVDVVYSFAEENNILMVKNKKNQSWTLPGGKVEAGESLTEAAAREMKEETGYGIQPLDILAVNEAVISSEHVYFIVFRARITDRPDAITFDENIVEAKWVPLHEADRLLSVFHPNGIMHWLNREGAEYHHEGKK

SEQ ID NO: 9707 - protein, 430 aa, Bacillus licheniformis
MSSVVVVGTQWGDEGKGKITDFLSENAEVIARYQGGNNAGHTIKFNGVTYKLHLIPSGIFYKDKTCVIGNGMVVDPKALVTELAYLHERNVSTDNLRISNRAHVILPYHLKLDAVEEERKGANKIGTTKKGIGPAYMDKAARVGIRIADLLDRDVFEEKLARNLEEKNRLLEKMYDAEGFKIEDILDEYYEYGQQIKQYVCDTSVVLNDALDDGRRVLFEGAQGVMLDIDQGTYPFVTSSNPVAGGVTIGSGVGPTKIQHVVGVSKAYTTRVGDGPFPTELNNEIGDQIREVGREYGTTTGRPRRVGWFDSVVVRHARRVSGITDLSLNSIDVLTGIETLKICVAYKYRGEILEEFPASLKALAECEPVYEEMPGWTEDITGAKSLSDLPENARHYLERVSQLTGIPLSIFSVGPDRSQTNVVRSVYRPN

SEQ ID NO: 9708 - protein, 46 aa, Bacillus licheniformis
LNICVVGFLCIFVQEKRFFLDLTYRLSIKKKIYEIRFIITNKNVQR

SEQ ID NO: 9709 - protein, 88 aa, Bacillus licheniformis
METVLIFASVLSPIILALVELVKKTVKMPKNLIPLVSLLIGLLIGAAAYPFTDLELVLRLWSGGLAGLTATGLFEIGKNRNARKKKNP

SEQ ID NO: 9710 - protein, 454 aa, Bacillus licheniformis
MTDLLNDRLPPQNIEAEQAVLGAVFLEPSALTLASEVLIPDDFYRMSHQKIFNAMLVLGDRGEPVDLVTVTSELANTDLLEEVGGISYLTDIANSVPTAANIEYYAKIVEEKSILRRLIRTATTIAQDGYTREDEVEDLLSEAEKTIMEVAQRKNSGAFQNIKDVLVQTYDNIEQLHNRKGDITGIPTGFTELDRMTAGFQRNDLIIVAARPSVGKTAFALNIAQNVATKTDESVAIFSLEMGAEQLVMRMLCAEGNINAQNLRTGNLTEEDWGKLTMAMGSLSNSGIFIDDTPGIRVSEIRSKCRRLKQENGLGMILIDYLQLIQGSGRSSDNRQQEVSEISRALKALARELEVPVIALSQLSRGVEQRQDKRPMMSDIRESGSIEQDADIVAFLYRDDYYDKESENKNIIEIIIAKQRNGPVGTVSLAFVKEYNKFVNLERRFDDAGVAPGA

SEQ ID NO: 9711 - protein, 65 aa, Bacillus licheniformis
MKVYTVSPNAETDGWFLKLEDTAPVELYDTRTEAVEKGEEMAKENRPAKLVIYDRQDNKEDERSY

SEQ ID NO: 9712 - protein, 72 aa, Bacillus licheniformis
LKSTISELKKKLYEQQIRAKGLYTFEEYKDMRNVLQTLRMKFAAYEEWDLYQHATDLMVSILLKNSWNSRVD

SEQ ID NO: 9713 - protein, 45 aa, Bacillus licheniformis
MKPLQISAETAQKLSETLNLPLEQIMHLPQHILLAKIAEIQKKDQ

SEQ ID NO: 9714 - protein, 401 aa, Bacillus licheniformis
MHYIDARRARLNNIFLIAGIIFIAFNLRPAITAVGPLISSIRSDMDLTNGMAGFLTTLPLLSFAVLSPVAPKLGQKLGNERTLWVGLVILLIGILLRSYGESITLFAGTALIGVGIAICNVLLPSLIKHKFPDKAGIMTSFYTTAMSIFAALASGISIPLSHGLAWGWSASLMVWAGLAFVAILIWVPQLRYHDTGNRTVSLKADGQTVWRSKIAWQVTFFMGIQSFLFYCTIAWLPEILRSHGMSMSLAGWMLSLMQFASLPSTFLTPVLAGRFQNQKSIVLALGILYLAGMSGLLYGGSTAMLTLWVILIGIGQGSSISLALTLIGLRSENADQAAALSGMSQSAGYLLAAIGPSFVGFLYDHMHSWNGPILLFIGALVALIGAGLGAGRNQYIYAKAA

SEQ ID NO: 9715 - protein, 401 aa, Bacillus licheniformis
VKTKPSQRYIFKHLHIYSENGMIEDGFLLTNGEKIEAYGPMADIPASAQTAEQLTFPENFKVLPGMIDVHIHGANGADVMDGTAEALQTMAEALPKEGTTSFLATTMTQDKATIEHALANVHRYREAGGRPGTAEVLGVHLEGPFISEKRCGAQPPDDIIAPDLSLFKEWQRISGNNIKLVTLAPELEGSLELISFLKETGVIASAGHSDAGLKEMEAAIKAGLSHVTHLFNGMRGLHHREPGTAGSALLHDELKAEVIADGIHVHPAVFKLAFQQKQKEGIILITDAMRAKCLKNGTYTLGGQEVFVKGEKAVLRDGTLAGSILKMNQAALNMMDFTGCSLEDIVYMTAVNPARQLHIYDRKGSIRSGKDADLIILNEKNEVVMTLCKGVIAFSKREVSP

SEQ ID NO: 9716 - protein, 248 aa, Bacillus licheniformis
MKIIEAKDYQDMSQTAARFIIEQVNRLSAPVLGLATGGTPLGTYQVLREDHARNKTTYKHVYTVNLDEYVGVSPDHENSYTFYMKKQLFDHIDIPLSHTHLPNGMACDLDAECSRYEALIERLGGIDLQVLGLGLNGHIGFNEPGTPFSSKTHTVELTQSTKEANARYFDSYDAVPSQAITMGISTIMKSKQILLLVSGEKKAGILAKLLTEEPNEDTPASVLKTHQDVVIIADSDALSIVKERGMAF

SEQ ID NO: 9717 - protein, 243 aa, Bacillus licheniformis
LIKKDSHIPIYYQIETEIKKLAETKDLKPGDLIPSEREFAEKYEVSRMTVRQAVNNLGNEGILVRQRGKGTFIAEPKIEQPLKGLTSFSEDMKSRGMRPGTKMLGFGVIPCDQSTARKLEIREGASVYEVKRIRLADDIPMAYEISYLPADFINGLTEDIMSASLYDYVENTLSLTIDRAAQTLEPAIASQAESEPLDIEEGAPVLLIERLSYLDDGRPFEVVKSVYRGDRYKFVIDMKRKDQ

SEQ ID NO: 9718 - protein, 298 aa, Bacillus licheniformis
MRKTEDTNDKSTALDEMNALDIVTLMNEEDHTVPRAITPCLPLIAEAAETIVSRFEQGGRVFTAGAGTSGRIAVLDAAELPPTFSIDESRWTGLIAGGYDAMWMPLEENEDDREKIVADLKAQSFSKDDVLIGVTASGSTPYVLGALSYAKQIGAASVSISCNADTEAGKLSDIAIEVQTGPEIIRGSTRLKAGTAQKMILNMLSTAAMVRLGRVYQNEMVNMRLLNQKLAGRAVTILMNTTGLSEDEALQALKESGNDIKAAIFMTLTNGTLEDARRCLSHENGHLKKAIQYHRKGF

SEQ ID NO: 9719 - protein, 457 aa, Bacillus licheniformis
MLGFLQNIGRALMLPIAVLPAAGLLLALGREDLLNIPFIAASGQSILDQLPIIFAIGVAIGLSKDGHGAAALSGAIGYFVLTGGLAAINKDLNMGVLGGIIAGVVAAVMYNRFKDAKLPDWLGFFGGKRSVPIMTAFCSIILAGIFGFVWIYAQQAIDAIGGWIIHAGALGVGIFGLLNRLLLPLGLHHILNNMVWMVFGEFAGKTGDMNRFFAGDPSAGAFMTGFFPIMMFGLPAACLAMIAAAKKHRRKATAGLLIGLAFTSFLTGITEPIEFTFMFLSPLLFGIHALLTASAMTVTNMLGIHHGFTFSAGTIDYLLNFGIATKPLLLLPLGLVYGIIYFIIFYFLITKLNLKTPGREDDDEQENTAVSPDTGSSKYETLADKYIEALGGKENIETLNNCVTRLRLKVRDASKLDESAMKSMGAKGFVKLNQHEVQVIIGTDVEFLANEMRKRTE

SEQ ID NO: 9720 - protein, 149 aa, Bacillus licheniformis
MKVIFLQDVKGKGKKGEVKNVADGYAHNFLIKKGLAVEATSANISALEGQKKKEKKEAAEELKSAKELKKQLEEITVELSAKSGEGGRLFGSVTSKQIADALQKGHQLKVDKRKIELNDAIRSLGYTNVPVKLHPEVQATLKVHVKEQS

SEQ ID NO: 9721 - protein, 660 aa, Bacillus licheniformis
VPSFYEKPLFRYPIYSLIVVTIISVLINIYFNWVAGAAGVLILGVILYFLKRADSQIRKELDDYISTLSYRLKKVGEEALLEMPIGIMLFNDQYYIEWANPFMASCFNENTLVGRSLYDTCESVVPLIKQEVDTETITLNERKFNVVIKREEKLLYFFDVTEQTQIEKQYENERTVLAYIFLDNYDDVTQGLDDQTRSSINSEVTSLLNQWAQEYGIFLKRVSSERFIGVLNEHILSELEASKFSILDEVREKTSVHTISLTLSIGIGASVASLKELGDLAQSSLDLALGRGGDQVAIKQPNGKVKFYGGKTNPMEKRTRVRARVISHALKEIVSESSNVIIMGHKFPDMDSIGSAIGILKVAQANGKDGFVVIDSNQIGSSVQRLIGEIKKYEELWSRFITPEEALEIAKDDTLLVIVDTHKPSFVIEERLVNKIENIVVIDHHRRGEEFIKDPLLVYMEPYASSTAELVTELLEYQPKRLKINMIEATALLAGIIVDTKSFSLRTGSRTFDAASYLRAKGADTVLVQKFLKETADHYIKRAKLIQHTVFYQNGIAIASLPDDEADEYFDQVIIAQAADSLLSMSDVEASFAVARRDENTVCISARSLGEVNVQIIMEALEGGGHLTNAATQLTDITVEETLRRLKEAIDEYFEGGIQK

SEQ ID NO: 9722 - protein, 309 aa, Bacillus licheniformis
VKQTRALVEGAIMVSIFAVLLMISLYIPFIGTILLLTLPLPAMVQTIRHGLKPGISVGLVSLPVSLIAGSLGGLMFAIPVSAAGVIMGFYYRRKEPAQAIAAAAVTYMVSFVLLLIISVQFLGLNLIETANQAYNETFKTFESSIKQFGNDKEVAKQIELLNEQFKQAQYLYPTAIVIFSGITAFLNHLLAKPVLRRIIQIPSLKPFRDMRLPQSIIWIYLLTILLSLAPVEEGSVYYSVLLNASLIMGFVLVIQGFSFVFYFCHAKKLPTVLPVLFLIIGLFSPLLYLVRILGIIDIGFNLRERVKKS

SEQ ID NO: 9723 - protein, 38 aa, Bacillus licheniformis
MNQKEQHRRLLFSNVAISFSNKDDEMSRSRPSLIVSLF

SEQ ID NO: 9724 - protein, 46 aa, Bacillus licheniformis
VLDMLKDFFLFLSGGLRVTLLVAVLIILLLIRKARKKNKEKSGFLD

SEQ ID NO: 9725 - protein, 158 aa, Bacillus licheniformis
MTTKTLAWHETLELHELIAAQSVGLVKIKKSMKKISDPQLRQLYSVSAKALEQNLRELLPFLPKAPAFQREDERADLYFDAGDLLVLAKTTVRNYAIAITETSTPELRRVLVKQINAAIKLHEQVFYFMYQRGLYPAYNLVDLLKGDAMHAQKAISMR

SEQ ID NO: 9726 - protein, 139 aa, Bacillus licheniformis
VYRHILLAADGSKHSERAADHAIHLASMSNEAVVDMIYVLDYAKAKHEVLHSENRTELERERRSRLLSIENKLKQAAVPYQMTMQHGDPGPAIVSYANHHDVDIVIIGSRGLNTLQEMVLGSVSHKVAKRVKCPVLIVK

SEQ ID NO: 9727 - protein, 488 aa, Bacillus licheniformis
LNVKQLNSEWFSNVRGDILSGIVVALALIPEAIAFSIIAGVDPMVGLYASFCIAVVISFTGGRPAMISAATGAMALLMGTLVRDHGLDYLFAATILTGIIQLIFGVLKIARFMKFIPRSVMVGFVNALAILILMAQVPHFVGVSNMTYVVAGITLLIIYVLPRFTKAVPSALVAIIAMTVFAIFGHFDLRTVGDLGEMKQSLPAFMIPNIPFNFETLAIIFPTAFALSIVGLLESLLTSSIVDDMTDTESDKNRESRGQGIANIVAGFFGGMAGCAMIGQSVINVKSGGRGRLSTFVAGVFLMFLIMVLGDWVVQIPMAALAGVMIMVSIGTFDWSSFSMLRKVPLTDSIVMIVTVVTVMATHDLSKGVFAGVILSAIFFVAKISKLKIEEKSEENAVKYIIKGQVFFASVQDFVNSFKTGEQTKKVILDFSEAHIWDDSAVAAIEKVVLKMKEQGIDVDLIGLNESSWKLVEKLATYDQPHRSVSNH

SEQ ID NO: 9728 - protein, 433 aa, Bacillus licheniformis
MAQELEKRPGHTRWYISSLLSSMIILNYFDRVAISVAAPAIQDSFQLTATQLGIVFSIYTYSYTLMQIPVGSLLDKYGVAWVTRVGMTLWSFLTIILAFLQGKLLLYIVRFLIGLTSASAFPAASKATALWFPPNERGLANSLFDSAAKFANVIGAPLVAFLVTTFDWRAAFLTIGIINVLFTVFFWLYYEQPDRHKRISKEELHYIQKHNAVSEEDISERTLIALKAMLTNRKVWGLMIGFTGYGYTFNLLLTWLPTFFKETYGMDIMSSGLFTAVPWLISTVSGIVVGGWLVDFLIQKGHSNTKVYQTIIVIGMSLGFAFLGAVFTHNITIAIICISVGLAGISATAPIGWSISADIAPVGSISLLSSMVNLANNLFGGIIAVSLTGYLVDVTGSFTLSFLVAGFVLLLGLVFYLAVLGDIKRIRIGKQKT

SEQ ID NO: 9729 - protein, 37 aa, Bacillus licheniformis
MLKETTRLLINKKRTRPHWVLFLLSAYSPATYGSKAI

SEQ ID NO: 9730 - protein, 79 aa, Bacillus licheniformis
MAGGRRGGRAKRRKVCYFTSNGITHIDYKDVDLLRKFISERGKILPRRVTGTSAKYQRKLTVAIKRARQMALLPYVAGE

SEQ ID NO: 9731 - protein, 170 aa, Bacillus licheniformis
MLNRVVLVGRLTKDPELRYTPSGAAVATFTLAVNRTFTNQQGEREADFINCVVWRRQAENVANFLKKGSLAGVDGRLQTRSYENQQGQRVYVTEVQAESVQFLEPKGGGSGSGGYSGGQGGQHFGGGQNEPAPFGGSQNNQNRNQGNSFNDDPFANDGKPIDISDDDLPF

SEQ ID NO: 9732 - protein, 95 aa, Bacillus licheniformis
MRKYEIMYIIRPDVDEESKKAVVERFNNILTTNGAEITETKDWGKRRLAYEINDFRDGFYQILNVQAGAEAVQEFDRLAKISDDIIRHIVVKEEE

SEQ ID NO: 9733 - protein, 366 aa, Bacillus licheniformis
MALTAGIVGLPNVGKSTLFNAITQAGAESANYPFCTIDPNVGIVEVPDERLQKLTELVNPKKTVPTAFEFTDIAGIVKGASKGEGLGNKFLSHIRQVDAICHVVRCFADDNITHVSGKVDPISDIETINLELILADLETVEKRIGRVGKMAKQKDKEAVFEFEILTKLKEAFEQEKPARSVEFSEEQQKVLKQLHLLTTKPVLYVANVSEDEVADPSGNEYVQKVREFAAAENAEVIVVCAKIESEIAELEGEEKAMFLEELGIEESGLDQLIKASYSLLGLATYFTAGEQEVRAWTFKKGMKAPECAGIIHTDFERGFIRAETVAYDDLLEAGSMTAAKEAGKVRLEGKEYIVKDGDVIHFRFNV

SEQ ID NO: 9734 - protein, 37 aa, Bacillus licheniformis
MITIKDKLTKLAFQSYKLDENSFFIETEKKHKEVRQD

SEQ ID NO: 9735 - protein, 68 aa, Bacillus licheniformis
LADKEFGLNDVVEMKKPHPCGTNRWKIIRMGMDIRIKCEGCSHSVMIPRKEFQRKLKKILVKHEESES

SEQ ID NO: 9736 - protein, 337 aa, Bacillus licheniformis
VWRAGMKWMLLILGSLIGAGYASGQEIWQFFGDESGLAILLFTIMFSLSTYIVMKISYEQKSEHFLPVLETLIGPMLAKVYDVLIILYLFTTTIVMIAGGGVTLQIFHIPFWTGVILFCLCTGLLFLWGLNGILSVNSYLIPILVAGLLYALISFQTAHHQPWLLNLTHQYNWPAGIAFTSLNILSVVAVLSAVGKEMKGVGEAKIASILSGLVFGAISYMYNETLVELAGELAHYEIPLFAVLEGAPFPIFIFMTAVLCVAIYTTTISSILGLSSRFLSFVNWPRWVIVILLLSIMAPFTSIGFSNLIAFLYPIYGLLNLYLLVNILLYPILSKWK

SEQ ID NO: 9737 - protein, 40 aa, Bacillus licheniformis
MVVYSISSCLFFYALDESIWSAGKNTLLREDTIFYFVILI

SEQ ID NO: 9738 - protein, 205 aa, Bacillus licheniformis
MNRKGGIFSQEPMNEYISHTDPLAVKQIEKVLSVYLKEAGDRPIVIVCIGTDRSTGDSLGPLVGMKLSAKQLTRFHVYGTLADPVHAVNLNEKLDHIHQQHQNPFMIAIDACLGRTKSVGSFQIGKGPLKPGAGVQKSLPEVGHVHINGIVNVSGFMEYFVLQNTRLNLVMSMANVLADGLSHLEKTGSQRRHVSPIERMTGRMS

SEQ ID NO: 9739 - protein, 282 aa, Bacillus licheniformis
MPKGLGKGINALFSNVDLSEETVEEIKLQDLRPNPYQPRKTFDDQSLKDLKESILQHGVLQPIIVRKSIKGYDIVAGERRFRAAEKAGLETIPAIVRELSESLMMEIALLENLQREDLSPLEEAKAYESLLKHLDMTQEQLAKRLGKSRPHIANHLRLLTLPEDVQKLIDNGTLSMGHGRTLLGLKNKKKLEPLVQKVVSEQLNVRQLEKLIQQLNADVPRETKKPKQVKDAVIKERESYLRNYFGTPVTIKKQKKKGRIEIEFYSNEDLECILELLAQEDA

SEQ ID NO: 9740 - protein, 253 aa, Bacillus licheniformis
VGKIIAITNQKGGVGKTTTSVNLGACLAYIGKRVLLVDIDPQGNATSGIGVEKADVDQCVYDILVDDADVKDVIKTTSVENLDVIPATIQLAGAEIELVPTISREVRLKRALESVKQNYDFMIIDCPPSLGLLTINALTASDSVVIPVQCEYYALEGLSQLLNSVRLVQKHLNTDLMIDGVLLTMLDARTNLGIQVIEEVKKYFRDKVYKTVIPRNVRLSEAPSHGKPIILYDPRSRGAEVYLELAKEVAANA

SEQ ID NO: 9741 - protein, 147 aa, Bacillus licheniformis
METRFLMEKVNPEGYRGMLELEKAQASSGIDPILKELIKIRASQLNGCAFCLNMHTKDARQNGETEQRIYALNAWREAPFFTEKERAVLALTEAVTRIGEHGLPDEIYNEVRTHFTEAETAELIMAAVTINAWNRIAIATRKMPAAD

SEQ ID NO: 9742 - protein, 285 aa, Bacillus licheniformis
MEYYRQYHSLLFSIAYRMLGSFQDAEDIIQELFADLQEKDIGQIDHIQAYLTKSITNRCINELQSARKKREVYIGEWLPEPQVALSAQIPAEYVEEKEKVSYAFLVVMSRLNPVERAVLMFREVFGYHYKEISSIIGKSEANCRQIHSRLKQKLNEDISVFSQPVEEQQLAQLFIESAKTGNFEEFSKKLIEDAVLYTDGGGKVRSALRPIYGKSRIYAFFTGVVSKGSFSGRFMPVDINDQKGVLIMKNNRPAYAVCFAWNPEGDSVKNVFIVSNPDKLKHIKI

SEQ ID NO: 9743 - protein, 283 aa, Bacillus licheniformis
MKHSFSRLFGLGDKEEEAEIAEHDTNKEEIQEIPVGDIIPNRFQPRTIFSEEKIKELAATIHTHGIIQPIVVRKTEREGQYELIAGERRWRAVQTLDWEKVPAIIKDFSDTETASVALIENLQREELSSIEEAHAYARLLELHDLTQEALAQRLGKGQSTIANKLRLLKLPEEVQEAILKKEISERHARALIPLKQPDLQVKLLHEVIEKSLNVKQTEDRVVKMLEQDKRKPKPKRKAYSRDARIAMNTIRQSLSMVEDSGVKLNTEEEEFEEYIQFTIRIPK

SEQ ID NO: 9744 - protein, 239 aa, Bacillus licheniformis
MNIEQFTAGLEKKGISLSSFQLEQFETYYEWLVEWNEKMNLTSITEKKEVYLKHFYDSIAASFYVDFKKMNTLCDVGAGAGFPSLPIKICFPHLHVTIVDSLNKRIHFLNQLSAALKLENTAFYHDRAETFGRSKDHRESYDVVTARAVARLSVLSELCLPLVKKDGLFVALKAASADEEIETGKKAIKTLGGKIETVHSFQLPIEESERNIIVIKKQSQTPKKFPRKPGTPNKSPIEG

SEQ ID NO: 9745 - protein, 628 aa, Bacillus licheniformis
MGYEAGQYDVVVVGAGHAGVEAALASARQGAKTLVLTINLDMVAFMPCNPSVGGPAKGIVVREIDALGGEMAKNIDKTHIQMRLLNTGKGPAVRALRAQADKFQYQHEMKKTLENEPNLTMLQGMVERLLIEDGECRGVITQTGAEYRSKTVVLTTGTFLRGKIILGDLSYSSGPNNQQPSIKLSEHLEELGFDLVRFKTGTPPRVNSHSIDYSKTEIQPGDEVPRAFSYETVEYITDQLPCWLTYTSPETHEIIDNNLHRSPMYSGMIKGTGPRYCPSIEDKVVRFNDKPRHQIFLEPEGRNTQEVYVQGLSTSLPEDVQRKMLSTIPGLENVQMMRAGYAIEYDAIVPTQLWPTLETKKIPGLFTAGQINGTSGYEEAAGQGIMAGINAGRKALGKEEVILSRSDAYIGVLIDDLVTKGTNEPYRLLTSRAEYRLLLRHDNADLRLTEIGYQIGLISEERYQKFQEKKAAIEAEKKRLHSVIIKPTKENQEYIRSLGGSELKDGIRATDLMKRPEMNYETVTALAPPEQKVAGDVAEQVEIQIKYEGYIEKSLQQVEKLKKMENKKIPDRIDYDAIKGIATEARQKLKEVRPLSVAQASRISGVNPADISILLVYLEQGRIAKVAE

SEQ ID NO: 9746 - protein, 459 aa, Bacillus licheniformis
MDTIAAISTPMGEGAIAIVRMSGPEALAIADKVYKGPRGKRLSSVDSHTINYGHIVDPETEKVVEEVMVSVLKAPKTFTREDIVEINCHGGLVTVNQVLQLVLREGARLAEPGEFTKRAFLNGRIDLSQAEAVMDLIRAKTDRAMNVAMNQMEGRLSSLIKRLRAEILETLAHVEVNIDYPEYDDVEEMTHKMLIEKATKVKKEIEALLTTSEQGKILREGISTVIIGRPNVGKSSLLNSLVHETKAIVTDIPGTTRDVIEEYVNVRGVPLRLVDTAGIRETEDIVERIGVERSRQVLKEADLILLVLNYSESLSDEDIKLFEATKGMDIIVIVNKTDLEQKLDLDRVRELAGNQPVVTTSLLKEEGIDELEEAIQSLFFTGAIESGDLTYVSNTRHISLLHEAKRAITDALEGIENDVPIDMVQIDLTRCWEVLGEIIGDAVHESLIDQLFSQFCLGK

SEQ ID NO: 9747 - protein, 51 aa, Bacillus licheniformis
MKTEVPKIGASVFLPLKIDEMQQNQFKFYFFRRKLLMKMKFNCYSHVDKLK

SEQ ID NO: 9748 - protein, 207 aa, Bacillus licheniformis
VKELTATGRTVDEAVQSGLEQLGLHADDVEVDVVDEGKKGLFGIFGHRSAVVNIREKIDPVKEAKQYLENVISNMGIQAQVTAEEESKRVVFQLKGDKTALLIGKRGQTLNALETLTQLVLNRHSDRYIQAVVDAEGYRAKRKETLAQLALKLADQAARQKKDIHLEPMPSSERKVIHDTLAGYSQHIETYSTGEDHNRHLVISYKK

SEQ ID NO: 9749 - protein, 264 aa, Bacillus licheniformis
LKRRILLLFSMIGVIVLLAGCTEINQPITAESEGFWNTYIVYPLSQLITYVANLTNENFGLAIIIVTILIRLLILPLMIKQTKSSKAMQALQPEMQKLREKYSSKDQKTQQKLQQETMALMQKHGVNPLAGCFPILIQMPILIGFYHAIMRTREIAEHSFLWFDLGERDPYFILPILAGVFTFIQQKLMMAGTAQQNPQMAMMLWLMPIMIVVFAISFPAALSLYWVVGNLFMIAQTFFIKGPDLKAERQEAAAGGKKSGGKKK

SEQ ID NO: 9750 - protein, 119 aa, Bacillus licheniformis
MKKRNRLKKNEDFQKVFKKGKSMANRQYVLYVLHQPEAKEFRVGLSVSKKIGNAVVRNRVKRLIRQVIQEERNLLKQENDYIIIARKPAAELSYEETKKSLQHLFRKSFVYRKKPNQPS

SEQ ID NO: 9751 - protein, 44 aa, Bacillus licheniformis
MKRTFQPNNRKRSKVHGFRSRMSSKNGRLVLARRRRKGRKVLSA
